(19) United States
(12) Patent Application Publication
(10) Pub. No.: US 2023/0235056 A1
(43) Pub. Date: Jul. 27, 2023

(54) ANTI-T CELL ANTIGEN-BINDING MOLECULE FOR USE IN COMBINATION WITH ANGIOGENESIS INHIBITOR

(71) Applicant: Chugai Seiyaku Kabushiki Kaisha, Tokyo (JP)

(72) Inventors: Takayoshi TANAKA, Tokyo (JP); Yuji SANO, Kanagawa (JP); Yumiko KAWAI, Kanagawa (JP)

(21) Appl. No.: 18/010,615

(22) PCT Filed: Jun. 18, 2021
(86) PCT No.: PCT/JP2021/023149

§ 371 Date: Dec. 15, 2022

(30) Foreign Application Priority Data
Jun. 19, 2020 (JP) 2020-106501

(51) Int. Cl. C07K 16/28; C07K 16/22; A61P 35/00

(52) U.S. Cl. CPC C07K 16/2809; C07K 16/22; A61P 35/00; C07K 2317/52; C07K 2317/56

(57) ABSTRACT

The present disclosure provides methods for preventing, alleviating, or treating cytokine release resulting from administration of a VEGF inhibitor or side effects resulting from the cytokine release. To prevent, alleviate, or treat cytokine release or its side effects, the disclosure also provides combination therapies that use a lymphocyte-stimulating pharmaceutical agent, represented by an anti-T cell antigen-binding molecule, with a VEGF inhibitor. Among the anti-T cell antigen-binding molecules, for example, antibodies that recruit T cells as effector cells into tumor tissues are called T cell redirecting antibodies, and are known as means for treating tumors. On the other hand, when systemic cytokine production is stimulated by binding of antibodies to T cells, it is feared that this systemic action will lead to aberrations such as CRS. The present disclosure provides means for alleviating systemic cytokine production, and will enable safer use of anti-T cell antigen-binding molecules in tumor treatment.

### TECHNICAL FIELD

[0001] The present disclosure relates to anti-T cell antigen-binding molecules for use in combination with angiogenesis inhibitors. Furthermore, the present disclosure relates to pharmaceutical compositions and methods for preventing, alleviating, or treating adverse reactions caused by cytokine production associated with administration of anti-T cell antigen-binding molecules.

### BACKGROUND ART

[0002] Antibodies are drawing attention as pharmaceuticals because of their high stability in plasma and few adverse reactions (NPL 1 and NPL 2). Antibodies are known to induce not only an antigen-binding action, an agonistic action, and an antagonistic action, but also effector cell-mediated cytotoxic activities (also called effector functions) such as antibody-dependent cytotoxicity (ADCC), antibody dependent cell phagocytosis (ADCP), and complement-dependent cytotoxicity (CDC), and exhibit antitumor effects against cancer cells (NPL 3). A number of therapeutic antibodies showing excellent anti-tumor effects have been developed as pharmaceuticals aimed for cancer treatment (NPL 4); and while existing therapeutic antibodies have shown excellent actions, the therapeutic outcome achieved by administration of these antibodies is still not satisfactory.

[0003] Antibodies (bispecific antibodies) that bind to two or more types of antigens with one molecule are being studied as molecules that inhibit multiple targets. If all antigens recognized by a bispecific antibody are antigens specifically expressed in cancer, the bispecific antibody exhibits cytotoxic activity to cancer cells when it binds to any of the antigens; therefore, in comparison to a conventional antibody pharmaceutical that recognizes one antigen, a more efficient antitumor effect can be expected from such an antibody.

[0004] As one of the bispecific antibodies, a T cell-redirecting antibody, which is an antibody whose mechanisms of antitumor effect is cytotoxicity mediated by the recruitment of T cells as effector cells, has been known from the 1980s (NPLs 5, 6, and 7). Unlike antibodies that employ ADCC, which is mediated by the recruitment of NK cells or macrophages as effector cells, as the mechanism for their antitumor effects, a T cell-redirecting antibody is a bispecific antibody comprising an antibody against any one of the subunits constituting the T-cell receptor (TCR) complex on T cells, in particular, an antibody that binds to the CD3 epsilon chain; and an antibody that binds to an antigen on the target cancer cell. T cells come close to cancer cells via simultaneous binding of the T cell-redirecting antibody to the CD3 epsilon chain and a cancer antigen. As a result, antitumor effects against cancer cells are considered to be exerted through the cytotoxic activity possessed by T cells. For example, in recent years, novel T cell-redirecting antibodies have been provided, which are antibodies whose two Fabs respectively bind to a cancer antigen (GPC3) and the CD3ε chain expressed on T cells, and have an Fc region with reduced FcγR-binding activity (PTL 1 and 2).

[0005] On the other hand, occurrence of toxicity associated with exertion of high antitumor activity by the T cell-redirecting antibody, for example, development of cytokine release syndrome (CRS), has been reported (NPL 8).

### CITATION LIST

### Patent Literature

[0006] [PTL 1] WO2012/073985 (TRAB concept patent)
[0007] [PTL 2] WO2016/047722 (ERY974 product patent)

### Non-Patent Literature

[0008] [NPL 1] Nat. Biotechnol. (2005) 23, 1073-1078
[0009] [NPL 2] Eur J Pharm Biopharm. (2005) 59 (3), 389-396
[0010] [NPL 3] Drug Des Devel Ther (2009) 3, 7-16
[0011] [NPL 4] Clin Cancer Res. (2010) 16 (1), 11-20
[0012] [NPL 5] Nature (1985) 314 (6012), 628-31
[0013] [NPL 6] Int J Cancer (1988) 41 (4), 609-15.
[0014] [NPL 7] Proc Natl Acad Sci USA (1986) 83 (5), 1453-7
[0015] [NPL 8] Cancer J. 2014 March-April; 20(2): 119-122.

### SUMMARY OF INVENTION

### Technical Problem

[0016] In a non-limiting embodiment, the present disclosure relates to combination therapies comprising an anti-T cell antigen-binding molecule and an angiogenesis inhibitor, as well as pharmaceutical compositions and such for use in the combination therapies.

### Solution to Problem

[0017] In a non-limiting embodiment, the present inventors found that administration of a vascular epithelial cell growth factor (Vascular Endothelial Growth Factor (VEGF)) inhibitor, which is a representative angiogenesis inhibitor, can prevent, alleviate, or treat cytokine release syndrome (CRS) associated with administration of an anti-T cell antigen-binding molecule in an individual.

[0018] In a non-limiting embodiment, the present disclosure relates to the following:
[0019] (A1) a pharmaceutical composition comprising an anti-T cell antigen-binding molecule, wherein its use in combination with a vascular epithelial cell growth factor (VEGF) inhibitor prevents and/or alleviates and/or treats cytokine release syndrome and/or cytokine release;
   [0020] (A1-1) the pharmaceutical composition of (A1), wherein the VEGF inhibitor is administered before, simultaneously with, or after administration of the pharmaceutical composition;
   [0021] (A1-2) the pharmaceutical composition of (A1), wherein the VEGF inhibitor is administered before or simultaneously with administration of the pharmaceutical composition;
   [0022] (A1-3) the pharmaceutical composition of any one of (A1) to (A1-2), wherein the VEGF inhibitor is administered 6 days, 5 days, 4 days, 3 days, 2 days, or 1 day before the administration of the pharmaceutical composition, or on the same day as but before administration of the pharmaceutical composition;
   [0023] (A1-4) the pharmaceutical composition of any one of (A1) to (A1-3), wherein the VEGF inhibitor is one or more VEGF inhibitors selected from an anti-VEGF antigen-binding molecule, an anti-VEGFR1 antigen-binding molecule, an anti-VEGFR2 antigen-binding molecule, a fusion protein comprising a VEGF receptor or a fragment thereof, and a tyrosine kinase inhibitor;
   [0024] (A1-5) the pharmaceutical composition of any one of (A1) to (A1-4), wherein the VEGF inhibitor is one or more VEGF inhibitors selected from Bevacizumab, Ramucirumab, and Aflibercept;
   [0025] (A1-6) the pharmaceutical composition of any one of (A1) to (A1-5), which is further additionally for use in combination with an immune checkpoint inhibitor;
   [0026] (A1-7) the pharmaceutical composition of (A1-6), wherein the immune checkpoint inhibitor is selected from an anti-PD1 antibody, an anti-PD-L1 antibody, and an anti-PD-L2 antibody;
   [0027] (A1-8) the pharmaceutical composition of (A1-6) or (A1-7), wherein the immune checkpoint inhibitor is Atezolizumab;
   [0028] (A1-9) the pharmaceutical composition of any one of (A1) to (A1-8), wherein a corticosteroid is not administered before or simultaneously with the administration of the pharmaceutical composition;
   [0029] (A1-10) the pharmaceutical composition of any one of (A1) to (A1-8), wherein a corticosteroid is further administered before, simultaneously with, or after the administration of the pharmaceutical composition;
   [0030] (A1-11) the pharmaceutical composition of (A1-9) or (A1-10), wherein the corticosteroid is dexamethasone, a pharmaceutically acceptable salt thereof, or a derivative thereof;
   [0031] (A1-12) the pharmaceutical composition of any one of (A1) to (A1-11), wherein the anti-T cell antigen-binding molecule is a bispecific antigen-binding molecule comprising:
      [0032] (1) a domain comprising an antibody variable region having T cell receptor complex-binding activity; and
      [0033] (2) a domain comprising an antibody variable region having cancer antigen-binding activity;
   [0034] (A1-13) the pharmaceutical composition of any one of (A1) to (A1-12), wherein the anti-T cell antigen-binding molecule is a bispecific antibody comprising:
      [0035] (1) a domain comprising an antibody variable region having T cell receptor complex-binding activity;
      [0036] (2) a domain comprising an antibody variable region having glypican 3-binding activity; and
      [0037] (3) a domain comprising an Fc region with reduced binding activity towards an Fcγ receptor;
   [0038] (A1-14) the pharmaceutical composition of any one of (A1) to (A1-13), which is for treatment of cancer;
   [0039] (A1-15) the pharmaceutical composition of any one of (A1) to (A1-14), which is for treating cancer while preventing or alleviating cytokine release syndrome and/or cytokine release;
   [0040] (A1-16) the pharmaceutical composition of any one of (A1) to (A1-15), wherein the cytokine release syndrome and/or cytokine release are associated with administration of the anti-T cell antigen-binding molecule; and
   [0041] (A1-17) the pharmaceutical composition of any one of (A1) to (A1-16), wherein the cytokine release syndrome is caused by cytokine release from either or both of a non-tumor tissue and a tumor tissue.

[0042] Alternatively, in a non-limiting embodiment, the present disclosure relates to the following:
[0043] (A2) a kit comprising (i) a container, (ii) a pharmaceutical composition in the container, wherein the composition comprises an anti-T cell antigen-binding molecule, and (iii) a document instructing administration of a VEGF inhibitor before, simultaneously with, or after administration of the pharmaceutical composition to prevent and/or alleviate and/or treat cytokine release syndrome and/or cytokine release;
   [0044] (A2-1) a kit comprising (i) a container, (ii) a pharmaceutical composition in the container, wherein the composition comprises an anti-T cell antigen-binding molecule, and (iii) a document instructing administration of a VEGF inhibitor 6 days, 5 days, 4 days, 3 days, 2 days, or 1 day before the administration of the pharmaceutical composition, or on the same day as but before administration of the pharmaceutical composition to prevent and/or alleviate and/or treat cytokine release syndrome and/or cytokine release;
   [0045] (A2-2) the kit of (A2) or (A2-1), wherein the VEGF inhibitor is one or more VEGF inhibitors selected from an anti-VEGF antigen-binding molecule, an anti-VEGFR1 antigen-binding molecule, an anti-VEGFR2 antigen-binding molecule, a fusion protein comprising a VEGF receptor or a fragment thereof, and a tyrosine kinase inhibitor;
   [0046] (A2-3) the kit of any one of (A2) to (A2-2), wherein the VEGF inhibitor is one or more VEGF inhibitors selected from Bevacizumab, Ramucirumab, and Aflibercept;
   [0047] (A2-4) the kit of any one of (A2) to (A2-3), further comprising a label attached to the container, wherein the label indicates that the pharmaceutical composition can be used for treating cancer;
   [0048] (A2-5) the kit of any one of (A2) to (A2-4), comprising a document instructing to further additionally use the pharmaceutical composition in combination with an immune checkpoint inhibitor;
   [0049] (A2-6) the kit of (A2-5), wherein the immune checkpoint inhibitor is selected from an anti-PD1 antibody, an anti-PD-L1 antibody, and an anti-PD-L2 antibody;
   [0050] (A2-7) the pharmaceutical composition of (A2-5) or (A2-6), wherein the immune checkpoint inhibitor is Atezolizumab;
   [0051] (A2-8) the kit of any one of (A2) to (A2-7), further comprising a document instructing not to administer a corticosteroid before or simultaneously with administration of the pharmaceutical composition;
   [0052] (A2-9) the kit of any one of (A2) to (A2-7), further comprising a document instructing further administration of a corticosteroid before, simultaneously with, or after administration of the pharmaceutical composition;
   [0053] (A2-10) the kit of (A2-8) or (A2-9), wherein the corticosteroid is dexamethasone, a pharmaceutically acceptable salt thereof, or a derivative thereof;
   [0054] (A2-11) the kit of any one of (A2) to (A2-10), wherein the anti-T cell antigen-binding molecule is a bispecific antigen-binding molecule comprising:
      [0055] (1) a domain comprising an antibody variable region having T cell receptor complex-binding activity; and
      [0056] (2) a domain comprising an antibody variable region having cancer antigen-binding activity;
   [0057] (A2-12) the kit of any one of (A2) to (A2-11), wherein the anti-T cell antigen-binding molecule is a bispecific antibody comprising:
      [0058] (1) a domain comprising an antibody variable region having T cell receptor complex-binding activity;
      [0059] (2) a domain comprising an antibody variable region having glypican 3-binding activity; and
      [0060] (3) a domain comprising an Fc region with reduced binding activity towards an Fcγ receptor;
   [0061] (A2-13) the kit of any one of (A2) to (A2-12), wherein prescription of the pharmaceutical composition is performed according to the instructions in the document;
   [0062] (A2-14) the kit of any one of (A2) to (A2-13), which is for treating cancer by the prescription instructed by the document;
   [0063] (A2-15) the kit of any one of (A2) to (A2-14), wherein the cytokine release syndrome and/or cytokine release are associated with administration of the anti-T cell antigen-binding molecule;
   [0064] (A2-16) the kit of any one of (A2) to (A1-15), wherein the cytokine release syndrome is caused by cytokine release from either or both of a non-tumor tissue and a tumor tissue;
   [0065] (A2-17) the kit of any one of (A2) to (A2-16), wherein prescription of the pharmaceutical composition is performed according to the instructions in the document;
[0066] (A3) use of an anti-T cell antigen-binding molecule in the manufacture of a pharmaceutical composition, wherein the use of the pharmaceutical composition in combination with a VEGF inhibitor treats cancer while preventing and/or alleviating and/or treating cytokine release syndrome and/or cytokine release;
   [0067] (A3-1) the use of (A3), wherein the VEGF inhibitor is administered before, simultaneously with, or after administration of the pharmaceutical composition;
   [0068] (A3-2) the use of (A3), wherein the VEGF inhibitor is administered before or simultaneously with administration of the pharmaceutical composition;
   [0069] (A3-3) the use of any one of (A3) to (A3-2), wherein the VEGF inhibitor is administered 6 days, 5 days, 4 days, 3 days, 2 days, or 1 day before the administration of the pharmaceutical composition, or on the same day as but before administration of the pharmaceutical composition;
   [0070] (A3-4) the use of any one of (A3) to (A3-3), wherein the VEGF inhibitor is one or more VEGF inhibitors selected from an anti-VEGF antigen-binding molecule, an anti-VEGFR1 antigen-binding molecule, an anti-VEGFR2 antigen-binding molecule, a fusion protein comprising a VEGF receptor or a fragment thereof, and a tyrosine kinase inhibitor;
   [0071] (A3-5) the use of any one of (A3) to (A3-4), wherein the VEGF inhibitor is one or more VEGF inhibitors selected from Bevacizumab, Ramucirumab, and Aflibercept;
   [0072] (A3-6) the use of any one of (A3) to (A3-5), wherein the pharmaceutical composition is further additionally used in combination with an immune checkpoint inhibitor;
   [0073] (A3-7) the use of (A3-6), wherein the immune checkpoint inhibitor is selected from an anti-PD1 antibody, an anti-PD-L1 antibody, and an anti-PD-L2 antibody;
   [0074] (A3-8) the use of (A3-6) or (A3-7), wherein the immune checkpoint inhibitor is Atezolizumab;
   [0075] (A3-9) the use of any one of (A3) to (A3-8), wherein a corticosteroid is not administered before or simultaneously with the administration of the pharmaceutical composition;
   [0076] (A3-10) the use of any one of (A3) to (A3-8), wherein a corticosteroid is further administered before, simultaneously with, or after the administration of the pharmaceutical composition;
   [0077] (A3-11) the use of (A3-9) or (A3-10) wherein the corticosteroid is dexamethasone, a pharmaceutically acceptable salt thereof, or a derivative thereof;
   [0078] (A3-12) the use of any one of (A3) to (A3-11), wherein the anti-T cell antigen-binding molecule is a bispecific antigen-binding molecule comprising:
      [0079] (1) a domain comprising an antibody variable region having T cell receptor complex-binding activity; and
      [0080] (2) a domain comprising an antibody variable region having cancer antigen-binding activity;
   [0081] (A3-13) the use of any one of (A3) to (A3-12), wherein the anti-T cell antigen-binding molecule is a bispecific antibody comprising:
      [0082] (1) a domain comprising an antibody variable region having T cell receptor complex-binding activity;
      [0083] (2) a domain comprising an antibody variable region having glypican 3-binding activity; and
      [0084] (3) a domain comprising an Fc region with reduced binding activity towards an Fcγ receptor;
   [0085] (A3-14) the use of any one of (A3) to (A3-13), wherein the cytokine release syndrome and/or cytokine release are associated with administration of the anti-T cell antigen-binding molecule;
   [0086] (A3-15) the use of any one of (A3) to (A3-14), wherein the cytokine release syndrome is caused by cytokine release from either or both of a non-tumor tissue and a tumor tissue;
[0087] (A4) use of an anti-T cell antigen-binding molecule in a combination therapy with a VEGF inhibitor, wherein the combination therapy is for treating cancer while preventing and/or alleviating and/or treating cytokine release syndrome and/or cytokine release;
   [0088] (A4-1) the use of (A4), wherein in the combination therapy, the VEGF inhibitor is administered before, simultaneously with, or after administration of the T cell antigen-binding molecule;
   [0089] (A4-2) the use of (A4), wherein in the combination therapy, the VEGF inhibitor is administered before or simultaneously with administration of the T cell antigen-binding molecule;
   [0090] (A4-3) the use of any one of (A4) to (A4-2), wherein in the combination therapy, the VEGF inhibitor is administered 6 days, 5 days, 4 days, 3 days, 2 days, or 1 day before the administration of the anti-T cell antigen-binding molecule, or on the same day as but before administration of the anti-T cell antigen-binding molecule;
   [0091] (A4-4) the use of any one of (A4) to (A4-3), wherein the VEGF inhibitor is one or more VEGF inhibitors selected from an anti-VEGF antigen-binding molecule, an anti-VEGFR1 antigen-binding molecule, an anti-VEGFR2 antigen-binding molecule, a fusion protein comprising a VEGF receptor or a fragment thereof, and a tyrosine kinase inhibitor;
   [0092] (A4-5) the use of any one of (A4) to (A4-4), wherein the VEGF inhibitor is one or more VEGF inhibitors selected from Bevacizumab, Ramucirumab, and Aflibercept;
   [0093] (A4-6) the use of any one of (A4) to (A4-5), wherein the combination therapy involves further additionally administering an immune checkpoint inhibitor;
   [0094] (A4-7) the use of (A4-6), wherein the immune checkpoint inhibitor is selected from an anti-PD1 antibody, an anti-PD-L1 antibody, and an anti-PD-L2 antibody;
   [0095] (A4-8) the use of (A4-6) or (A4-7), wherein the immune checkpoint inhibitor is Atezolizumab;
   [0096] (A4-9) the use of any one of (A4) to (A4-8), wherein in the combination therapy, a corticosteroid is not administered before or simultaneously with the administration of the anti-T cell antigen-binding molecule;
   [0097] (A4-10) the use of any one of (A4) to (A4-8), wherein in the combination therapy, a corticosteroid is further administered before, simultaneously with, or after the administration of the anti-T cell antigen-binding molecule;
   [0098] (A4-11) the use of (A4-9) or (A4-10), wherein the corticosteroid is dexamethasone, a pharmaceutically acceptable salt thereof, or a derivative thereof;
   [0099] (A4-12) the use of any one of (A4) to (A4-11), wherein the anti-T cell antigen-binding molecule is a bispecific antigen-binding molecule comprising:
      [0100] (1) a domain comprising an antibody variable region having T cell receptor complex-binding activity; and
      [0101] (2) a domain comprising an antibody variable region having cancer antigen-binding activity;
   [0102] (A4-13) the use of any one of (A4) to (A4-12), wherein the anti-T cell antigen-binding molecule is a bispecific antibody comprising:
      [0103] (1) a domain comprising an antibody variable region having T cell receptor complex-binding activity;
      [0104] (2) a domain comprising an antibody variable region having glypican 3-binding activity; and
      [0105] (3) a domain comprising an Fc region with reduced binding activity to an Fcγ receptor;
   [0106] (A4-14) the use of any one of (A4) to (A4-13), wherein the cytokine release syndrome and/or cytokine release are associated with administration of the anti-T cell antigen-binding molecule; and
   [0107] (A4-15) the use of any one of (A4) to (A4-14), wherein the cytokine release syndrome is caused by cytokine release from either or both of a non-tumor tissue and a tumor tissue.

[0108] Alternatively, in a non-limiting embodiment, the present disclosure relates to the following:
[0109] (A5) a method for treating cancer while preventing and/or alleviating and/or treating cytokine release syndrome and/or cytokine release by administering an anti-T cell antigen-binding molecule to a subject, wherein the method comprises use of a VEGF inhibitor in combination;
   [0110] (A5-1) the method of (A5), wherein the VEGF inhibitor is administered before, simultaneously with, or after administration of the anti-T cell antigen-binding molecule;
   [0111] (A5-2) the method of (A5), wherein the VEGF inhibitor is administered before or simultaneously with administration of the anti-T cell antigen-binding molecule;
   [0112] (A5-3) the method of any one of (A5) to (A5-2), wherein the VEGF inhibitor is administered 6 days, 5 days, 4 days, 3 days, 2 days, or 1 day before the administration of the anti-T cell antigen-binding molecule, or on the same day as but before administration of the anti-T cell antigen-binding molecule;
   [0113] (A5-4) the method of any one of (A5) to (A5-3), wherein the VEGF inhibitor is one or more VEGF inhibitors selected from an anti-VEGF antigen-binding molecule, an anti-VEGFR1 antigen-binding molecule, an anti-VEGFR2 antigen-binding molecule, a fusion protein comprising a VEGF receptor or a fragment thereof, and a tyrosine kinase inhibitor;
   [0114] (A5-5) the method of any one of (A5) to (A5-4), wherein the VEGF inhibitor is one or more VEGF inhibitors selected from Bevacizumab, Ramucirumab, and Aflibercept;
   [0115] (A5-6) the method of any one of (A5) to (A5-5), which comprises further using an immune checkpoint inhibitor in combination;
   [0116] (A5-7) the method of (A5-6), wherein the immune checkpoint inhibitor is selected from an anti-PD1 antibody, an anti-PD-L1 antibody, and an anti-PD-L2 antibody;
   [0117] (A5-8) the method of (A5-6) or (A5-7), wherein the immune checkpoint inhibitor is Atezolizumab;
   [0118] (A5-9) the method of any one of (A5) to (A5-8), wherein a corticosteroid is not administered before or simultaneously with the administration of the anti-T cell antigen-binding molecule;
   [0119] (A5-10) the method of any one of (A5) to (A5-8), wherein a corticosteroid is further administered before, simultaneously with, or after the administration of the anti-T cell antigen-binding molecule;
   [0120] (A5-11) the method of (A5-9) or (A5-10), wherein the corticosteroid is dexamethasone, a pharmaceutically acceptable salt thereof, or a derivative thereof;
   [0121] (A5-12) the method of any one of (A5) to (A5-11), wherein the anti-T cell antigen-binding molecule is a bispecific antigen-binding molecule comprising:
      [0122] (1) a domain comprising an antibody variable region having T cell receptor complex-binding activity; and
      [0123] (2) a domain comprising an antibody variable region having cancer antigen-binding activity;
   [0124] (A5-13) the method of any one of (A5) to (A5-12), wherein the anti-T cell antigen-binding molecule is a bispecific antibody comprising:
      [0125] (1) a domain comprising an antibody variable region having T cell receptor complex-binding activity;
      [0126] (2) a domain comprising an antibody variable region having glypican 3-binding activity; and
      [0127] (3) a domain comprising an Fc region with reduced binding activity towards an Fcγ receptor;
   [0128] (A5-14) the method of any one of (A5) to (A5-13), wherein the cytokine release syndrome and/or cytokine release are associated with administration of the anti-T cell antigen-binding molecule; and
   [0129] (A5-15) (A, wherein the cytokine release syndrome is caused by cytokine release from either or both of a non-tumor tissue and a tumor tissue.

[0130] Alternatively, the present disclosure includes the following embodiments:
[0131] (B1) a pharmaceutical composition comprising a VEGF inhibitor, wherein the composition is for preventing and/or alleviating and/or treating cytokine release syndrome and/or cytokine release;
   [0132] (B1-1) the pharmaceutical composition of (B1), wherein the VEGF inhibitor is one or more VEGF inhibitors selected from an anti-VEGF antigen-binding molecule, an anti-VEGFR1 antigen-binding molecule, an anti-VEGFR2 antigen-binding molecule, a fusion protein comprising a VEGF receptor or a fragment thereof, and a tyrosine kinase inhibitor;
   [0133] (B1-2) the pharmaceutical composition of (B1) or (B1-1), wherein the VEGF inhibitor is selected from the group consisting of Bevacizumab, Ramucirumab, and Aflibercept;
   [0134] (B1-3) the pharmaceutical composition of any one of (B1) to (B1-2), which is for its use in combination with an immune checkpoint inhibitor;
   [0135] (B1-4) the pharmaceutical composition of (B1-3), wherein the immune checkpoint inhibitor is selected from an anti-PD1 antibody, an anti-PD-L1 antibody, and an anti-PD-L2 antibody;
   [0136] (B1-5) the pharmaceutical composition of (B1-3) or (B1-4), wherein the immune checkpoint inhibitor is Atezolizumab;
   [0137] (B1-6) the pharmaceutical composition of any one of (B1) to (B1-5), which is for use in its combination therapy with an anti-T cell antigen-binding molecule;
   [0138] (B1-7) the pharmaceutical composition of (B1-6), which is for administration before, simultaneously with, or after administration of the anti-T cell antigen-binding molecule;
   [0139] (B1-8) the pharmaceutical composition of (B1-6), which is for administration before or simultaneously with administration of the anti-T cell antigen-binding molecule;
   [0140] (B1-9) the pharmaceutical composition of any one of (B1-6) to (B1-8), which is for administration 6 days, 5 days, 4 days, 3 days, 2 days, or 1 day before the administration of the anti-T cell antigen-binding molecule, or on the same day as but before administration of the anti-T cell antigen-binding molecule;
   [0141] (B1-10) the pharmaceutical composition of any one of (B1-6) to (B1-9), wherein a corticosteroid is not administered before or simultaneously with the administration of the anti-T cell antigen-binding molecule;
   [0142] (B1-11) the pharmaceutical composition of any one of (B1-6) to (B1-9), wherein a corticosteroid is further administered before, simultaneously with, or after the administration of the anti-T cell antigen-binding molecule;
   [0143] (B1-12) the pharmaceutical composition of (B1-10) or (B1-11), wherein the corticosteroid is dexamethasone, a pharmaceutically acceptable salt thereof, or a derivative thereof;
   [0144] (B1-13) the pharmaceutical composition of any one of (B1-6) to (B1-12), wherein the anti-T cell antigen-binding molecule is a bispecific antigen-binding molecule comprising:
      [0145] (1) a domain comprising an antibody variable region having T cell receptor complex-binding activity; and
      [0146] (2) a domain comprising an antibody variable region having cancer antigen-binding activity;
   [0147] (B1-14) the pharmaceutical composition of any one of (B1-6) to (B1-13), wherein the anti-T cell antigen-binding molecule is a bispecific antibody comprising:
      [0148] (1) a domain comprising an antibody variable region having T cell receptor complex-binding activity;
      [0149] (2) a domain comprising an antibody variable region having glypican 3-binding activity; and
      [0150] (3) a domain comprising an Fc region with reduced binding activity towards an Fcγ receptor;
   [0151] (B1-15) the pharmaceutical composition of any one of (B1-6) to (B1-14), wherein its use in combination with the anti-T cell antigen-binding molecule is for treating cancer while preventing and/or alleviating and/or treating cytokine release syndrome and/or cytokine release;
   [0152] (B1-16) the pharmaceutical composition of any one of (B1-6) to (B1-15), wherein the cytokine release syndrome and/or cytokine release are associated with administration of the anti-T cell antigen-binding molecule; and
   [0153] (B1-17) the pharmaceutical composition of any one of (B1) to (B1-16), wherein the cytokine release syndrome is caused by cytokine release from either or both of a non-tumor tissue and a tumor tissue.

[0154] Alternatively, in a non-limiting embodiment, the present disclosure relates to the following:
[0155] (B2) a kit comprising (i) a container, (ii) a pharmaceutical composition in the container, wherein the composition comprises a VEGF inhibitor, and (iii) a document instructing administration of the pharmaceutical composition to prevent and/or alleviate and/or treat cytokine release syndrome and/or cytokine release;
   [0156] (B2-1) the kit of (B2), wherein the VEGF inhibitor is one or more cytokine inhibitors selected from an anti-VEGF antigen-binding molecule, an anti-VEGFR1 antigen-binding molecule, an anti-VEGFR2 antigen-binding molecule, a fusion protein comprising a VEGF receptor or a fragment thereof, and a tyrosine kinase inhibitor;
   [0157] (B2-2) the kit of (B2) or (B2-1), wherein the VEGF inhibitor is one or more VEGF inhibitors selected from Bevacizumab, Ramucirumab, and Aflibercept;
   [0158] (B2-3) the kit of (B2) to (B2-2), further comprising a document instructing to use the pharmaceutical composition in combination with an immune checkpoint inhibitor;
   [0159] (B2-4) the kit of (B2-3), wherein the immune checkpoint inhibitor is selected from an anti-PD1 antibody, an anti-PD-L1 antibody, and an anti-PD-L2 antibody;
   [0160] (B2-5) the pharmaceutical composition of (B2-3) or (B2-4), wherein the immune checkpoint inhibitor is Atezolizumab;
   [0161] (B2-6) the kit of any one of (B2) to (B2-5), further comprising a document instructing to use the pharmaceutical composition in combination with an anti-T cell antigen-binding molecule;
   [0162] (B2-7) the kit of (B2-6), further comprising a document instructing to administer the pharmaceutical composition before, simultaneously with, or after administration of the anti-T cell antigen-binding molecule;
   [0163] (B2-8) the kit of (B2-6), further comprising a document instructing to administer the pharmaceutical composition before or simultaneously with administration of the anti-T cell antigen-binding molecule;
   [0164] (B2-9) the kit of any one of (B2-6) to (B2-8), further comprising a document instructing to administer the pharmaceutical composition 6 days, 5 days, 4 days, 3 days, 2 days, or 1 day before the administration of the anti-T cell antigen-binding molecule, or on the same day as but before administration of the anti-T cell antigen-binding molecule;
   [0165] (B2-10) the kit of any one of (B2-6) to (B2-9), further comprising a document instructing not to administer a corticosteroid before or simultaneously with administration of the anti-T cell antigen-binding molecule;
   [0166] (B2-11) the kit of any one of (B2-6) to (B2-9), further comprising a document instructing to further administer a corticosteroid before, simultaneously with, or after administration of the anti-T cell antigen-binding molecule;
   [0167] (B2-12) the kit of any one of (B2-10) to (B2-11), wherein the corticosteroid is dexamethasone, a pharmaceutically acceptable salt thereof, or a derivative thereof;
   [0168] (B2-13) the kit of any one of (B2-6) to (B2-12), wherein the anti-T cell antigen-binding molecule is a bispecific antigen-binding molecule comprising:
      [0169] (1) a domain comprising an antibody variable region having T cell receptor complex-binding activity; and
      [0170] (2) a domain comprising an antibody variable region having cancer antigen-binding activity;
   [0171] (B2-14) the kit of any one of (B2-6) to (B2-13), wherein the anti-T cell antigen-binding molecule is a bispecific antibody comprising:
      [0172] (1) a domain comprising an antibody variable region having T cell receptor complex-binding activity;
      [0173] (2) a domain comprising an antibody variable region having glypican 3-binding activity; and
      [0174] (3) a domain comprising an Fc region with reduced binding activity towards an Fcγ receptor;
   [0175] (B2-15) the kit of any one of (B2-6) to (B2-14), wherein combined use of the pharmaceutical composition and the anti-T cell antigen-binding molecule is for treating cancer while preventing and/or alleviating and/or treating cytokine release syndrome and/or cytokine release;
   [0176] (B2-16) the kit of any one of (B2-6) to (B2-15), wherein the cytokine release syndrome and/or cytokine release are associated with administration of the anti-T cell antigen-binding molecule;
   [0177] (B2-17) the kit of any one of (B2) to (B2-16), wherein the cytokine release syndrome is caused by cytokine release from either or both of a non-tumor tissue and a tumor tissue;
   [0178] (B2-18) the kit of any one of (B2) to (B2-17), wherein prescription of the pharmaceutical composition is performed according to the instructions in the document;
[0179] (B3) use of a VEGF inhibitor in the manufacture of a pharmaceutical composition for preventing and/or alleviating and/or treating cytokine release syndrome and/or cytokine release;
   [0180] (B3-1) the use of (B3), wherein the VEGF inhibitor is one or more cytokine inhibitors selected from an anti-VEGF antigen-binding molecule, an anti-VEGFR1 antigen-binding molecule, an anti-VEGFR2 antigen-binding molecule, a fusion protein comprising a VEGF receptor or a fragment thereof, and a tyrosine kinase inhibitor;
   [0181] (B3-2) the use of (B3) or (B3-1), wherein the VEGF inhibitor is one or more VEGF inhibitors selected from Bevacizumab, Ramucirumab, and Aflibercept;
   [0182] (B3-3) the use of any one of (B3) to (B3-2), wherein the pharmaceutical composition is used in combination with an immune checkpoint inhibitor;
   [0183] (B3-4) the use of (B3-3), wherein the immune checkpoint inhibitor is selected from an anti-PD1 antibody, an anti-PD-L1 antibody, and an anti-PD-L2 antibody;
   [0184] (B3-5) the use of (B3-3) or (B3-4), wherein the immune checkpoint inhibitor is Atezolizumab;
   [0185] (B3-6) the use of any one of (B3) to (B3-5), wherein the pharmaceutical composition is for use in its combination therapy with an anti-T cell antigen-binding molecule;
   [0186] (B3-7) the use of (B3-6), wherein the pharmaceutical composition is administered before, simultaneously with, or after administration of the anti-T cell antigen-binding molecule;
   [0187] (B3-8) the use of (B3-6), wherein the pharmaceutical composition is administered before or simultaneously with administration of the anti-T cell antigen-binding molecule;
   [0188] (B3-9) the use of any one of (B3-6) to (B3-8), wherein the pharmaceutical composition is administered 6 days, 5 days, 4 days, 3 days, 2 days, or 1 day before the administration of the anti-T cell antigen-binding molecule, or on the same day as but before administration of the anti-T cell antigen-binding molecule;
   [0189] (B3-10) the use of any one of (B3-6) to (B3-9), wherein a corticosteroid is not administered before or simultaneously with the administration of the anti-T cell antigen-binding molecule;
   [0190] (B3-11) the use of any one of (B3-6) to (B3-9), wherein a corticosteroid is further administered before, simultaneously with, or after the administration of the anti-T cell antigen-binding molecule;
   [0191] (B3-12) the use of (B3-10) or (B3-11), wherein the corticosteroid is dexamethasone, a pharmaceutically acceptable salt thereof, or a derivative thereof;
   [0192] (B3-13) the use of any one of (B3-6) to (B3-12), wherein the anti-T cell antigen-binding molecule is a bispecific antigen-binding molecule comprising:
      [0193] (1) a domain comprising an antibody variable region having T cell receptor complex-binding activity; and
      [0194] (2) a domain comprising an antibody variable region having cancer antigen-binding activity;
   [0195] (B3-14) the use of any one of (B3-6) to (B3-13), wherein the anti-T cell antigen-binding molecule is a bispecific antibody comprising:
      [0196] (1) a domain comprising an antibody variable region having T cell receptor complex-binding activity;
      [0197] (2) a domain comprising an antibody variable region having glypican 3-binding activity; and
      [0198] (3) a domain comprising an Fc region with reduced binding activity towards an Fcγ receptor;
   [0199] (B3-15) the use of any one of (B3-6) to (B3-14), wherein the combination therapy using the pharmaceutical composition and the anti-T cell antigen-binding molecule is for treating cancer while preventing and/or alleviating and/or treating cytokine release syndrome and/or cytokine release;
   [0200] (B3-16) the use of any one of (B3-6) to (B3-15), wherein the cytokine release syndrome and/or cytokine release are associated with administration of the anti-T cell antigen-binding molecule;
   [0201] (B3-17) the use of any one of (B3) to (B3-16), wherein the cytokine release syndrome is caused by cytokine release from either or both of a non-tumor tissue and a tumor tissue;
[0202] (B4) use of a VEGF inhibitor in preventing and/or alleviating and/or treating cytokine release syndrome and/or cytokine release;
   [0203] (B4-1) the use of (B4), wherein the VEGF inhibitor is one or more VEGF inhibitors selected from an anti-VEGF antigen-binding molecule, an anti-VEGFR1 antigen-binding molecule, an anti-VEGFR2 antigen-binding molecule, a fusion protein comprising a VEGF receptor or a fragment thereof, and a tyrosine kinase inhibitor;
   [0204] (B4-2) the use of (B4) or (B4-1), wherein the VEGF inhibitor is one or more VEGF inhibitors selected from Bevacizumab, Ramucirumab, and Aflibercept;
   [0205] (B4-3) the use of any one of (B4) to (B4-2), wherein the VEGF inhibitor is used in combination with an immune checkpoint inhibitor;
   [0206] (B4-4) the use of (B4-3), wherein the immune checkpoint inhibitor is selected from an anti-PD1 antibody, an anti-PD-L1 antibody, and an anti-PD-L2 antibody;
   [0207] (B4-5) the use of (B4-3) or (B4-4), wherein the immune checkpoint inhibitor is Atezolizumab;
   [0208] (B4-6) the use of any one of (B4) to (B4-5), wherein the VEGF inhibitor is for use in combination with an anti-T cell antigen-binding molecule;
   [0209] (B4-7) the use of (B4-6), wherein the VEGF inhibitor is administered before, simultaneously with, or after administration of the anti-T cell antigen-binding molecule;
   [0210] (B4-8) the use of (B4-6), wherein the VEGF inhibitor is administered before or simultaneously with administration of the anti-T cell antigen-binding molecule;
   [0211] (B4-9) the use of any one of (B4-6) to (B4-8), wherein the VEGF inhibitor is administered 6 days, 5 days, 4 days, 3 days, 2 days, or 1 day before the administration of the anti-T cell antigen-binding molecule, or on the same day as but before administration of the anti-T cell antigen-binding molecule;
   [0212] (B4-10) the use of any one of (B4-6) to (B4-9), wherein a corticosteroid is not administered before or simultaneously with the administration of the anti-T cell antigen-binding molecule;
   [0213] (B4-11) the use of any one of (B4-6) to (B4-9), wherein a corticosteroid is further administered before, simultaneously with, or after the administration of the anti-T cell antigen-binding molecule;
   [0214] (B4-12) the use of (B4-10) or (B4-11), wherein the corticosteroid is dexamethasone, a pharmaceutically acceptable salt thereof, or a derivative thereof;
   [0215] (B4-13) the use of any one of (B4-6) to (B4-12), wherein the anti-T cell antigen-binding molecule is a bispecific antigen-binding molecule comprising:
      [0216] (1) a domain comprising an antibody variable region having T cell receptor complex-binding activity; and
      [0217] (2) a domain comprising an antibody variable region having cancer antigen-binding activity;
   [0218] (B4-14) the use of any one of (B4-6) to (B4-13), wherein the anti-T cell antigen-binding molecule is a bispecific antibody comprising:
      [0219] (1) a domain comprising an antibody variable region having T cell receptor complex-binding activity;
      [0220] (2) a domain comprising an antibody variable region having glypican 3-binding activity; and
      [0221] (3) a domain comprising an Fc region with reduced binding activity towards an Fcγ receptor;
   [0222] (B4-15) the use of any one of (B4-6) to (B4-14), wherein use of the VEGF inhibitor in combination with the anti-T cell antigen-binding molecule is for treating cancer while preventing and/or alleviating and/or treating cytokine release syndrome and/or cytokine release;
   [0223] (B4-16) the use of any one of (B4-6) to (B4-15), wherein the cytokine release syndrome and/or cytokine release are associated with administration of the anti-T cell antigen-binding molecule; and
   [0224] (B4-17) the use of any one of (B4) to (B4-16), wherein the cytokine release syndrome is caused by cytokine release from either or both of a non-tumor tissue and a tumor tissue.

[0225] Alternatively, in a non-limiting embodiment, the present disclosure relates to the following:
[0226] (B5) a method of preventing and/or alleviating and/or treating cytokine release syndrome and/or cytokine release, wherein the method comprises administering a VEGF inhibitor to a subject;
   [0227] (B5-1) the method of (B5), wherein the VEGF inhibitor is one or more VEGF inhibitors selected from an anti-VEGF antigen-binding molecule, an anti-VEGFR1 antigen-binding molecule, an anti-VEGFR2 antigen-binding molecule, a fusion protein comprising a VEGF receptor or a fragment thereof, and a tyrosine kinase inhibitor;
   [0228] (B5-2) the method of (B5) or (B5-1), wherein the VEGF inhibitor is one or more VEGF inhibitors selected from Bevacizumab, Ramucirumab, and Aflibercept;
   [0229] (B5-3) the method of any one of (B5) to (B5-2), wherein the cytokine release syndrome and/or cytokine release are associated with administration of an anti-T cell antigen-binding molecule;
   [0230] (B5-4) the method of (B5-3), wherein the VEGF inhibitor is administered to a subject before, simultaneously with, or after administration of the anti-T cell antigen-binding molecule;
   [0231] (B5-5) the method of (B5-3), wherein the VEGF inhibitor is administered to a subject before or simultaneously with administration of the anti-T cell antigen-binding molecule;
   [0232] (B5-6) the method of any one of (B5-3) to (B5-5), wherein the VEGF inhibitor is administered to a subject 6 days, 5 days, 4 days, 3 days, 2 days, or 1 day before the administration of the anti-T cell antigen-binding molecule, or on the same day as but before administration of the anti-T cell antigen-binding molecule;
   [0233] (B5-7) the method of any one of (B5-3) to (B5-6), wherein the anti-T cell antigen-binding molecule is a bispecific antigen-binding molecule comprising:
      [0234] (1) a domain comprising an antibody variable region having T cell receptor complex-binding activity; and
      [0235] (2) a domain comprising an antibody variable region having cancer antigen-binding activity;
   [0236] (B5-8) the method of any one of (B5-3) to (B5-7), wherein the anti-T cell antigen-binding molecule is a bispecific antibody comprising:
      [0237] (1) a domain comprising an antibody variable region having T cell receptor complex-binding activity;
      [0238] (2) a domain comprising an antibody variable region having glypican 3-binding activity; and
      [0239] (3) a domain comprising an Fc region with reduced binding activity towards an Fcγ receptor;
   [0240] (B5-9) the method of any one of (B5) to (B5-8), which is for treating cancer while preventing and/or alleviating and/or treating cytokine release syndrome and/or cytokine release; and
   [0241] (B5-10) the method of (B5-9), wherein the cytokine release syndrome is caused by cytokine release from either or both of a non-tumor tissue and a tumor tissue;

[0242] Alternatively, in a non-limiting embodiment, the present disclosure relates to the following:
[0243] (C1) a method of treating cancer while preventing and/or alleviating and/or treating cytokine release syndrome and/or cytokine release, wherein the method comprises administering an anti-T cell antigen-binding molecule and a VEGF inhibitor to a subject;
   [0244] (C1-1) a method of combination therapy for treating cancer while preventing and/or alleviating and/or treating cytokine release syndrome and/or cytokine release, wherein the method comprises administering an anti-T cell antigen-binding molecule, and administering a VEGF inhibitor, to a subject;
   [0245] (C1-2) the method of (C1) or (C1-1), wherein the VEGF inhibitor is administered before, simultaneously with, or after administration of the T cell antigen-binding molecule to a subject;
   [0246] (C1-3) the method of any one of (C1) to (C1-2), wherein the VEGF inhibitor is administered before or simultaneously with administration of the T cell antigen-binding molecule to a subject;
   [0247] (C1-4) the method of any one of (C1) to (C1-3), wherein the VEGF inhibitor is administered 6 days, 5 days, 4 days, 3 days, 2 days, or 1 day before the administration of the anti-T cell antigen-binding molecule to a subject, or on the same day as but before administration of the anti-T cell antigen-binding molecule;
   [0248] (C1-5) the method of any one of (C1) to (C1-4), wherein the VEGF inhibitor is one or more VEGF inhibitors selected from an anti-VEGF antigen-binding molecule, an anti-VEGFR1 antigen-binding molecule, an anti-VEGFR2 antigen-binding molecule, a fusion protein comprising a VEGF receptor or a fragment thereof, and a tyrosine kinase inhibitor;
   [0249] (C1-6) the method of any one of (C1) to (C1-5), wherein the VEGF inhibitor is one or more VEGF inhibitors selected from Bevacizumab, Ramucirumab, and Aflibercept;
   [0250] (C1-7) the method of any one of (C1) to (C1-6), which comprises further administering an immune checkpoint inhibitor to a subject;
   [0251] (C1-8) the method of (C1-7), wherein the immune checkpoint inhibitor is selected from an anti-PD1 antibody, an anti-PD-L1 antibody, and an anti-PD-L2 antibody;
   [0252] (C1-9) the method of (C1-7) or (C1-8), wherein the immune checkpoint inhibitor is Atezolizumab;
   [0253] (C1-10) the method of any one of (C1) to (C1-9), wherein a corticosteroid is not administered to a subject before or simultaneously with the administration of the anti-T cell antigen-binding molecule;
   [0254] (C1-11) the method of any one of (C1) to (C1-9), which comprises further administering a corticosteroid to a subject before, simultaneously with, or after the administration of the anti-T cell antigen-binding molecule;
   [0255] (C1-12) the method of (C1-10) or (C1-11), wherein the corticosteroid is dexamethasone, a pharmaceutically acceptable salt thereof, or a derivative thereof;
   [0256] (C1-13) the method of any one of (C1) to (C1-12), wherein the anti-T cell antigen-binding molecule is a bispecific antigen-binding molecule comprising:
      [0257] (1) a domain comprising an antibody variable region having T cell receptor complex-binding activity; and
      [0258] (2) a domain comprising an antibody variable region having cancer antigen-binding activity;
   [0259] (C1-14) the method of any one of (C1) to (C1-13), wherein the anti-T cell antigen-binding molecule is a bispecific antibody comprising:
      [0260] (1) a domain comprising an antibody variable region having T cell receptor complex-binding activity;
      [0261] (2) a domain comprising an antibody variable region having glypican 3-binding activity; and
      [0262] (3) a domain comprising an Fc region with reduced binding activity towards an Fcγ receptor;
   [0263] (C1-15) the method of any one of (C1) to (C1-14), wherein the cytokine release syndrome and/or cytokine release are associated with administration of the anti-T cell antigen-binding molecule; and
   [0264] (C1-16) the method of any one of (C1) to (C1-15), wherein the cytokine release syndrome is caused by cytokine release from either or both of a non-tumor tissue and a tumor tissue.

[0265] In a non-limiting embodiment, the present disclosure relates to combination therapies of various embodiments disclosed herein, which comprise administering an anti-T cell antigen-binding molecule and a VEGF inhibitor; methods for treating cancer by the combination therapies; and methods aimed at any one or a combination selected from prevention, alleviation, and treatment, by the combination therapies, of cytokine release syndrome associated with administration of the anti-T cell antigen-binding molecule.

[0266] Alternatively, in a non-limiting embodiment, the present disclosure relates to the following:
[0267] (C2) a combination therapy for treating cancer, while preventing and/or alleviating and/or treating cytokine release syndrome and/or cytokine release, wherein the therapy comprises an anti-T cell antigen-binding molecule and a VEGF inhibitor;
   [0268] (C2-1) the combination therapy of (C2), wherein the VEGF inhibitor is administered before, simultaneously with, or after administration of the anti-T cell antigen-binding molecule;
   [0269] (C2-2) the combination therapy of (C2) or (C2-1), wherein the VEGF inhibitor is administered before or simultaneously with administration of the anti-T cell antigen-binding molecule;
   [0270] (C2-3) the combination therapy of (C2) or (C2-1), wherein the VEGF inhibitor is administered 6 days, 5 days, 4 days, 3 days, 2 days, or 1 day before the administration of the anti-T cell antigen-binding molecule, or on the same day as but before administration of the anti-T cell antigen-binding molecule;
   [0271] (C2-4) the combination therapy of any one of (C2) to (C2-3), wherein the VEGF inhibitor is one or more cytokine inhibitors selected from an anti-VEGF antigen-binding molecule, an anti-VEGFR1 antigen-binding molecule, an anti-VEGFR2 antigen-binding molecule, a fusion protein comprising a VEGF receptor or a fragment thereof, and a tyrosine kinase inhibitor;
   [0272] (C2-5) the combination therapy of any one of (C2) to (C2-4), wherein the VEGF inhibitor is one or more VEGF inhibitors selected from Bevacizumab, Ramucirumab, and Aflibercept;
   [0273] (C2-6) the combination therapy of any one of (C2) to (C2-5), which comprises further using an immune checkpoint inhibitor in combination;
   [0274] (C2-7) the combination therapy of (C2-6), wherein the immune checkpoint inhibitor is selected from an anti-PD1 antibody, an anti-PD-L1 antibody, and an anti-PD-L2 antibody;
   [0275] (C2-8) the combination therapy of (C2-6) or (C2-7), wherein the immune checkpoint inhibitor is Atezolizumab;
   [0276] (C2-9) the combination therapy of any one of (C2) to (C2-8), wherein a corticosteroid is not administered before or simultaneously with the administration of the anti-T cell antigen-binding molecule;
   [0277] (C2-10) the combination therapy of any one of (C2) to (C2-8), wherein a corticosteroid is further administered before, simultaneously with, or after the administration of the anti-T cell antigen-binding molecule;
   [0278] (C2-11) the combination therapy of (C2-9) or (C2-10), wherein the corticosteroid is dexamethasone, a pharmaceutically acceptable salt thereof, or a derivative thereof;
   [0279] (C2-12) the combination therapy of any one of (C2) to (C2-11), wherein the anti-T cell antigen-binding molecule is a bispecific antigen-binding molecule comprising:
      [0280] (1) a domain comprising an antibody variable region having T cell receptor complex-binding activity; and
      [0281] (2) a domain comprising an antibody variable region having cancer antigen-binding activity;
   [0282] (C2-13) the combination therapy of any one of (C2) to (C2-12), wherein the anti-T cell antigen-binding molecule is a bispecific antibody comprising:
      [0283] (1) a domain comprising an antibody variable region having T cell receptor complex-binding activity;
      [0284] (2) a domain comprising an antibody variable region having glypican 3-binding activity; and
      [0285] (3) a domain comprising an Fc region with reduced binding activity towards an Fcγ receptor;
   [0286] (C2-14) the combination therapy of any one of (C2) to (C2-13), wherein the cytokine release syndrome and/or cytokine release are associated with administration of the anti-T cell antigen-binding molecule;
   [0287] (C2-15) the combination therapy of any one of (C2) to (C2-14), wherein the cytokine release syndrome is caused by cytokine release from either or both of a non-tumor tissue and a tumor tissue;
[0288] (C3) a pharmaceutical composition comprising an anti-T cell antigen-binding molecule and a VEGF inhibitor, wherein the composition is for treating cancer while preventing and/or alleviating and/or treating cytokine release syndrome and/or cytokine release;
   [0289] (C3-1) the pharmaceutical composition of (C3), wherein the VEGF inhibitor is one or more cytokine inhibitors selected from an anti-VEGF antigen-binding molecule, an anti-VEGFR1 antigen-binding molecule, an anti-VEGFR2 antigen-binding molecule, a fusion protein comprising a VEGF receptor or a fragment thereof, and a tyrosine kinase inhibitor;
   [0290] (C3-2) the pharmaceutical composition of (C3) or (C3-1), wherein the VEGF inhibitor is one or more VEGF inhibitors selected from Bevacizumab, Ramucirumab, and Aflibercept;
   [0291] (C3-3) the pharmaceutical composition of any one of (C3) to (C3-2), wherein an immune checkpoint inhibitor is further used in combination;
   [0292] (C3-4) the pharmaceutical composition of (C3-3), wherein the immune checkpoint inhibitor is selected from an anti-PD1 antibody, an anti-PD-L1 antibody, and an anti-PD-L2 antibody;
   [0293] (C3-5) the pharmaceutical composition of (C3-3) or (C3-4), wherein the immune checkpoint inhibitor is Atezolizumab;
   [0294] (C3-6) the pharmaceutical composition of any one of (C3) to (C3-5), wherein a corticosteroid is not administered before or simultaneously with the administration of the pharmaceutical composition;
   [0295] (C3-7) the pharmaceutical composition of any one of (C3) to (C3-5), wherein a corticosteroid is further administered before, simultaneously with, or after the administration of the pharmaceutical composition;
   [0296] (C3-8) the pharmaceutical composition of (C3-6) or (C3-7), wherein the corticosteroid is dexamethasone, a pharmaceutically acceptable salt thereof, or a derivative thereof;
   [0297] (C3-9) the pharmaceutical composition of any one of (C3) to (C3-8), wherein the anti-T cell antigen-binding molecule is a bispecific antigen-binding molecule comprising:
      [0298] (1) a domain comprising an antibody variable region having T cell receptor complex-binding activity; and
      [0299] (2) a domain comprising an antibody variable region having cancer antigen-binding activity;
   [0300] (C3-10) the pharmaceutical composition of any one of (C3) to (C3-9), wherein the anti-T cell antigen-binding molecule is a bispecific antibody comprising:
      [0301] (1) a domain comprising an antibody variable region having T cell receptor complex-binding activity;
      [0302] (2) a domain comprising an antibody variable region having glypican 3-binding activity; and
      [0303] (3) a domain comprising an Fc region with reduced binding activity towards an Fcγ receptor;
   [0304] (C3-11) the pharmaceutical composition of any one of (C3) to (C3-10), wherein the cytokine release syndrome and/or cytokine release are associated with administration of the anti-T cell antigen-binding molecule;
   [0305] (C3-12) the pharmaceutical composition of any one of (C3) to (C3-11), wherein the cytokine release syndrome is caused by cytokine release from either or both of a non-tumor tissue and a tumor tissue; and
[0306] (C4) a combination of an anti-T cell antigen-binding molecule and a VEGF inhibitor.

### Effects of the Invention

[0307] Anti-T cell antigen-binding molecules which bind to T cell antigens such as CD3 are drawing attention as novel means for treating cancer that utilizes the antitumor effects of T cells possessed by living bodies. However, since they target T cells that produce cytokines, the possibility of causing adverse reactions due to cytokine production (for example, cytokine release syndrome; CRS) has been pointed out. Therefore, concerns of unexpected adverse reactions caused by cytokine production had existed for administration of anti-T cell antigen-binding molecules. In the present disclosure, an anti-T cell antigen-binding molecule is administered in combination with a VEGF inhibitor in a preplanned manner; therefore, unexpected adverse reactions caused by cytokines can be prevented or alleviated.

### BRIEF DESCRIPTION OF DRAWINGS

[0308] FIG. 1 shows the effect on drug efficacy of the ERY974 surrogate antibody (GC33/2C11) by the combined use of the anti-mouse VEGFR2 antibody (DC101). In the figure, the vertical axis represents the tumor volume (mm³), and the horizontal axis represents the number of days after tumor transplantation when the day of tumor transplantation is defined as Day 0.

[0309] FIG. 2-A shows the effect on tumor-derived cytokine (IL-6) production caused by the ERY974 surrogate antibody (GC33/2C11) by the combined use of the anti-mouse VEGFR2 antibody (DC101). In the figure, the vertical axis represents the plasma IL-6 concentration (pg/mL), the horizontal axis indicates the ingredients administered to the mice, and “combo” refers to combined use of the two ingredients. Indicated at the top of the graph is the time elapsed after administration when the time of the administration of the active ingredients is defined as 0.

[0310] FIG. 2-B shows the effect on tumor-derived cytokine (TNF) production caused by the ERY974 surrogate antibody (GC33/2C11) by the combined use of the anti-mouse VEGFR2 antibody (DC101). In the figure, the vertical axis represents the plasma TNF concentration (pg/mL), the horizontal axis indicates the ingredients administered to the mice, and “combo” refers to combined use of the two ingredients. Indicated at the top of the graph is the time elapsed after administration when the time of the administration of the active ingredients is defined as 0.

[0311] FIG. 2-C shows the effect on tumor-derived cytokine (IFNgamma) production caused by the ERY974 surrogate antibody (GC33/2C11) by the combined use of the anti-mouse VEGFR2 antibody (DC101). In the figure, the vertical axis represents the plasma IFNγ concentration (pg/mL), the horizontal axis indicates the ingredients administered to the mice, and “combo” refers to combined use of the two ingredients. Indicated at the top of the graph is the time elapsed after administration when the time of the administration of the active ingredients is defined as 0.

[0312] FIG. 2-D shows the effect on tumor-derived cytokine (CXCL9) production caused by the ERY974 surrogate antibody (GC33/2C11) by the combined use of the anti-mouse VEGFR2 antibody (DC101). In the figure, the vertical axis represents the plasma CXC ligand 9 concentration (pg/mL), the horizontal axis indicates the ingredients administered to the mice, and “combo” refers to combined use of the two ingredients. Indicated at the top of the graph is the time elapsed after administration when the time of the administration of the active ingredients is defined as 0.

[0313] FIG. 2-E shows the effect on tumor-derived cytokine (CXCL10) production caused by the ERY974 surrogate antibody (GC33/2C11) by the combined use of the anti-mouse VEGFR2 antibody (DC101). In the figure, the vertical axis represents the plasma CXCL10 concentration (pg/mL), the horizontal axis indicates the ingredients administered to the mice, and “combo” refers to combined use of the two ingredients. Indicated at the top of the graph is the time elapsed after administration when the time of the administration of the active ingredients is defined as 0.

[0314] FIG. 3 shows the effect on normal tissue-derived cytokine production caused by the ERY974 surrogate antibody (GC33/2C11) by the combined use of the anti-mouse VEGFR2 antibody (DC101). In the figure, the vertical axis represents the plasma concentration (pg/mL) of IL-6 (top left), TNFα (top right), IFNγ (middle left), IL-2 (middle right), CXCL9 (bottom left), or CXCL10 (bottom right) two hours after administration, and the horizontal axis indicates the active ingredients administered.

[0315] FIG. 4 shows the light chain variable region sequences and their various numbering according to Kabat and such.

### DESCRIPTION OF EMBODIMENTS

### I. Definition

[0316] The definitions below are provided to help understanding of the present invention illustrated herein.

### Specific

[0317] The term “specific” means that one of the molecules involved in specific binding does not show any significant binding to molecules other than a single or a number of binding partner molecules. Furthermore, the term is also used when a domain containing an antibody variable region is specific to a particular epitope among the multiple epitopes in an antigen. When an epitope bound by a domain containing an antibody variable region is included in a number of different antigens, antigen-binding molecules comprising the antibody variable region-containing domain can bind to various antigens that have the epitope.

### Binding Activity

[0318] The term “binding activity” refers to the strength of the sum total of noncovalent interactions between one or more binding sites of a molecule (e.g., an antibody) and its binding partner (e.g., an antigen). Herein, “binding activity” is not strictly limited to a 1:1 interaction between members of a binding pair (e.g., antibody and antigen). For example, when the members of a binding pair reflect a monovalent 1:1 interaction, the binding activity is particularly called the intrinsic binding affinity (affinity). When a member of a binding pair is capable of both monovalent binding and multivalent binding, the binding activity is the sum of each binding strength. The binding activity of a molecule X for its partner Y can generally be represented by the dissociation constant (KD) or “binding amount of analyte per unit amount of ligand” (hereinbelow, may be referred to as “binding amount”). Those skilled in the art would understand that, generally, lower value of dissociation constant (KD) means higher binding activity; and higher value of “binding amount of analyte per unit amount of ligand” or “binding amount” means higher binding activity. Binding activity can be measured by common methods known in the art, including those described herein. Specific illustrative and exemplary embodiments for measuring binding activity (including affinity) are described in the following. Specific illustrative and exemplary embodiments for measuring binding affinity are described in the following.

### Anti-“Target Antigen”-Binding Antigen-Binding Molecule

[0319] The terms “anti-‘target antigen’-binding antigen-binding molecule” (herein ‘target antigen’ is any antigen protein that can be targeted, and examples include a T cell antigen, cancer antigen, cytokine, and cytokine receptor) and “an antigen-binding molecule that binds to a target antigen” refer to an antigen-binding molecule that is capable of binding a target antigen with sufficient affinity such that the antigen-binding molecule is useful as a diagnostic and/or therapeutic agent when the antigen-binding molecule targets the antigen. In one embodiment, the extent of binding of an antigen-binding molecule to an unrelated, non-target antigen protein is less than about 10% of the binding of the antigen-binding molecule to the target antigen as measured, e.g., by a radioimmunoassay (RIA). In certain embodiments, an antigen-binding molecule that binds to the target protein has a dissociation constant (Kd) of 1 μM or less, 100 nM or less, 10 nM or less, 1 nM or less, 0.1 nM or less, 0.01 nM or less, or 0.001 nM or less (e.g. 10⁻⁸ M or less, e.g. from 10⁻⁸ M to 10⁻¹³ M, e.g., from 10⁻⁹ M to 10⁻¹³ M). In certain embodiments, an antigen-binding molecule binds to an epitope of the target antigen that is conserved among the target antigen from different species.

Antigen-Binding Molecule “that Binds to the Same Epitope” as a Reference Antigen-Binding Molecule

[0320] An antigen-binding molecule “that binds to the same epitope” as a reference antigen-binding molecule refers to an antigen-binding molecule that blocks binding of the reference antigen-binding molecule to its antigen in a competition assay by 50% or more, and conversely, the reference antigen-binding molecule blocks binding of the antigen-binding molecule to its antigen in a competition assay by 50% or more. An exemplary competition assay is provided herein.

[0321] In an exemplary competition assay, an immobilized antigen (for example, GPC3, CD3, and/or VEGF) is incubated in a solution comprising a first labeled antigen-binding molecule that binds to the antigen and a second unlabeled antigen-binding molecule that is being tested for its ability to compete with the first antigen-binding molecule for binding to the antigen. The second antigen-binding molecule may be present in a hybridoma supernatant. As a control, the immobilized antigen is incubated in a solution comprising the first labeled antigen-binding molecule but not the second unlabeled antigen-binding molecule. After incubation under conditions permissive for binding of the first antigen-binding molecule to the antigen, excess unbound antigen-binding molecule is removed, and the amount of label associated with the immobilized antigen is measured. If the amount of label associated with the immobilized antigen is substantially reduced in the test sample relative to the control sample, then that indicates that the second antigen-binding molecule is competing with the first antigen-binding molecule for binding to the antigen. See Harlow and Lane (1988) Antibodies: A Laboratory Manual ch. 14 (Cold Spring Harbor Laboratory, Cold Spring Harbor, N.Y.).

### Antigen-Binding Molecule

[0322] The term “antigen-binding molecule” herein is used in the broadest sense and encompasses various antibody structures, including but not limited to monoclonal antibodies, polyclonal antibodies, multispecific antibodies (e.g., bispecific antibodies), antibody derivatives, and antibody fragments so long as they exhibit the desired antigen-binding activity.

[0323] In certain embodiments, an antibody provided herein may be further modified to contain additional nonproteinaceous moieties that are known in the art and readily available (this is called “antibody derivatives”). The moieties suitable for derivatization of the antibody include but are not limited to water soluble polymers. Non-limiting examples of water soluble polymers include, but are not limited to, polyethylene glycol (PEG), copolymers of ethylene glycol/propylene glycol, carboxymethylcellulose, dextran, polyvinyl alcohol, polyvinyl pyrrolidone, poly-1, 3-dioxolane, poly-1,3,6-trioxane, ethylene/maleic anhydride copolymer, polyaminoacids (either homopolymers or random copolymers), and dextran or poly(n-vinyl pyrrolidone)polyethylene glycol, polypropylene glycol homopolymers, polypropylene oxide/ethylene oxide co-polymers, polyoxyethylated polyols (e.g., glycerol), polyvinyl alcohol, and mixtures thereof. Polyethylene glycol propionaldehyde may have advantages in manufacturing due to its stability in water. The polymer may be of any molecular weight, and may be branched or unbranched. The number of polymers attached to the antibody may vary, and if more than one polymer are attached, they can be the same or different molecules. In general, the number and/or type of polymers used for derivatization can be determined based on considerations including, but not limited to, the particular properties or functions of the antibody to be improved, whether the antibody derivative will be used in a therapy under defined conditions, etc.

### Antibody Fragment

[0324] An “antibody fragment” refers to a molecule other than an intact antibody that comprises a portion of an intact antibody that binds the antigen to which the intact antibody binds. Examples of antibody fragments include but are not limited to Fv, Fab, Fab′, Fab′-SH, F(ab′)2; diabodies; linear antibodies; single-chain antibody molecules (e.g. scFv); and multispecific antibodies formed from antibody fragments.

Antibody that Binds to the Same Epitope as a Reference Antibody

[0325] An “antibody that binds to the same epitope” as a reference antibody refers to an antibody that blocks binding of the reference antibody to its antigen in a competition assay by 50% or more, and conversely, the reference antibody blocks binding of the antibody to its antigen in a competition assay by 50% or more. An exemplary competition assay is provided herein.

### Chimeric Antibody

[0326] The term “chimeric” antibody refers to an antibody in which a portion of the heavy and/or light chain is derived from a particular source or species, while the remainder of the heavy and/or light chain is derived from a different source or species.

### Antibody Class

[0327] The “class” of an antibody refers to the type of constant domain or constant region possessed by its heavy chain. There are five major classes of antibodies: IgA, IgD, IgE, IgG, and IgM, and several of these may be further divided into subclasses (isotypes), e.g., IgG1, IgG2, IgG3, IgG4, IgA1, and IgA2. The heavy chain constant domains that correspond to the different classes of immunoglobulins are called alpha, delta, epsilon, gamma, and mu, respectively.

[0328] Constant regions of the isotypes IgG1, IgG2, IgG3, and IgG4 are called Cγ1, Cγ2, Cγ3, and Cγ4, respectively. The amino acid sequences of Fc region polypeptides forming human Cγ1, Cγ2, Cγ3, and Cγ4 are exemplified in SEQ ID NO: 23, 24, 25, and 26, respectively. The relationship between amino acid residues forming each amino acid sequence and Kabat's EU numbering (herein also referred to as EU INDEX) is shown in FIG. 1.

### Fc Region

[0329] The term “Fc region” herein is used to define a C-terminal region of an immunoglobulin heavy chain that contains at least a portion of the constant region. The term includes native sequence Fc regions and variant Fc regions. In one embodiment, a human IgG heavy chain Fc region extends from Cys226, or from Pro230, to the carboxyl-terminus of the heavy chain. However, the C-terminal lysine (Lys447) or glycine-lysine (Gly446-Lys447) of the Fc region may or may not be present. Unless otherwise specified herein, numbering of amino acid residues in the Fc region or constant region is according to the EU numbering system, also called the EU index, as described in Kabat et al., Sequences of Proteins of Immunological Interest, 5th Ed. Public Health Service, National Institutes of Health, Bethesda, Md., 1991.

### Fc Receptor

[0330] The term “Fc receptor” or “FcR” refers to a receptor that binds to the Fc region of an antibody. In some embodiments, an FcR is a native human FcR. In some embodiments, an FcR is one which binds an IgG antibody (a gamma receptor) and includes receptors of the Fc gamma RI, Fc gamma RII, and Fc gamma RIII subclasses, including allelic variants and alternatively spliced forms of those receptors. Fc gamma RII receptors include Fc gamma RIIA (an “activating receptor”) and Fc gamma RIIB (an “inhibiting receptor”), which have similar amino acid sequences that differ primarily in the cytoplasmic domains thereof. Activating receptor Fc gamma RIIA contains an immunoreceptor tyrosine-based activation motif (ITAM) in its cytoplasmic domain. Inhibiting receptor Fc gamma RIIB contains an immunoreceptor tyrosine-based inhibition motif (ITIM) in its cytoplasmic domain. (see, e.g., Daëron, Annu. Rev. Immunol. 15:203-234 (1997)). FcRs are reviewed, for example, in Ravetch and Kinet, Annu. Rev. Immunol 9:457-92 (1991); Capel et al., Immunomethods 4:25-34 (1994); and de Haas et al., J. Lab. Clin. Med. 126:330-41 (1995). Other FcRs, including those to be identified in the future, are encompassed by the term “FcR” herein.

[0331] The term “Fc receptor” or “FcR” also includes the neonatal receptor, FcRn, which is responsible for the transfer of maternal IgGs to the fetus (Guyer et al., J. Immunol. 117:587 (1976) and Kim et al., J. Immunol. 24:249 (1994)) and regulation of homeostasis of immunoglobulins. Methods of measuring binding to FcRn are known (see, e.g., Ghetie and Ward., Immunol. Today 18(12):592-598 (1997); Ghetie et al., Nature Biotechnology, 15(7):637-640 (1997); Hinton et al., J. Biol. Chem. 279(8):6213-6216 (2004); WO 2004/92219 (Hinton et al.).

[0332] Binding to human FcRn in vivo and plasma half life of human FcRn high affinity binding polypeptides can be assayed, e.g., in transgenic mice or transfected human cell lines expressing human FcRn, or in primates to which the polypeptides with a variant Fc region are administered. WO 2000/42072 (Presta) describes antibody variants with increased or decreased binding to FcRs. See also, e.g., Shields et al. J. Biol. Chem. 9(2):6591-6604 (2001).

### Fc Region-Comprising Antibody

[0333] The term “Fc region-comprising antibody” refers to an antibody that comprises an Fc region. The C-terminal lysine (residue 447 according to the EU numbering system) or C-terminal glycine-lysine (residues 446-447) of the Fc region may be removed, for example, during purification of the antibody or by recombinant engineering of the nucleic acid encoding the antibody. Accordingly, a composition comprising an antibody having an Fc region according to this invention can comprise an antibody with G446-K447, with G446 and without K447, with all G446-K447 removed, or a mixture of three types of antibodies described above.

[0334] Fc regions with reduced Fc receptor-binding activity include Fc regions with reduced binding activity to any of Fcγ receptors FcγI, FcγIIA, FcγIIB, FcγIIIA, and/or FcγIIIB. The reduced binding activity to any of the Fcγ receptors FcγI, FcγIIA, FcγIIB, FcγIIIA, and/or FcγIIIB can be assessed by using FACS and ELISA formats known to those skilled in the art as well as ALPHA screen (Amplified Luminescent Proximity Homogeneous Assay) and surface plasmon resonance (SPR)-based BIACORE method (Proc. Natl. Acad. Sci. USA (2006) 103(11), 4005-4010).

[0335] Antigen-binding molecules or antibodies comprising an Fc region with reduced Fc receptor-binding activity include antigen-binding molecules or antibodies with reduced effector function. Antigen-binding molecules or antibodies with reduced effector function include those with substitution of one or more of Fc region residues 238, 265, 269, 270, 297, 327 and 329 (U.S. Pat. No. 6,737,056). Such Fc mutants include Fc mutants with substitutions at two or more of amino acid positions 265, 269, 270, 297 and 327, including the so-called “DANA” Fc mutant with substitution of residues 265 and 297 to alanine (U.S. Pat. No. 7,332,581).

[0336] Certain antibody variants with increased or decreased binding to FcRs are described. (See, e.g., U.S. Pat. No. 6,737,056; WO 2004/056312, and Shields et al., J. Biol. Chem. 9(2): 6591-6604 (2001).)

[0337] In certain embodiments, an antibody variant comprises an Fc region with one or more amino acid substitutions which improve ADCC, e.g., substitutions at positions 298, 333, and/or 334 of the Fc region (EU numbering of residues).

[0338] In some embodiments, alterations are made in the Fc region that result in altered (i.e., either increased or decreased) C1q binding and/or Complement Dependent Cytotoxicity (CDC), e.g., as described in U.S. Pat. No. 6,194,551, WO 99/51642, and Idusogie et al. J. Immunol. 164: 4178-4184 (2000).

[0339] In some embodiments, Fc regions with reduced Fc receptor-binding activity include Fc mutants of the Fc regions illustrated herein.

### Framework

[0340] “Framework” or “FR” refers to variable domain residues other than hypervariable region (HVR) residues. The FR of a variable domain generally consists of four FR domains: FR1, FR2, FR3, and FR4. Accordingly, the HVR and FR sequences generally appear in the following sequence in VH (or VL): FR1-H1(L1)-FR2-H2(L2)-FR3-H3(L3)-FR4.

### Full Length Antibody

[0341] The terms “full length antibody,” “intact antibody,” and “whole antibody” are used herein interchangeably to refer to an antibody having a structure substantially similar to a native antibody structure or having heavy chains that contain an Fc region as defined herein.

### Host Cell

[0342] The terms “host cell,” “host cell line,” and “host cell culture” are used interchangeably and refer to cells into which exogenous nucleic acid has been introduced, including the progeny of such cells. Host cells include “transformants” and “transformed cells,” which include the primary transformed cell and progeny derived therefrom without regard to the number of passages. Progeny may not be completely identical in nucleic acid content to a parent cell, but may contain mutations. Mutant progeny that have the same function or biological activity as screened or selected for in the originally transformed cell are included herein.

### Human Antibody

[0343] A “human antibody” is one which possesses an amino acid sequence which corresponds to that of an antibody produced by a human or a human cell or derived from a non-human source that utilizes human antibody repertoires or other human antibody-encoding sequences. This definition of a human antibody specifically excludes a humanized antibody comprising non-human antigen-binding residues.

### Human Consensus Framework

[0344] A “human consensus framework” is a framework which represents the most commonly occurring amino acid residues in a selection of human immunoglobulin VL or VH framework sequences. Generally, the selection of human immunoglobulin VL or VH sequences is from a subgroup of variable domain sequences. Generally, the subgroup of sequences is a subgroup as in Kabat et al., Sequences of Proteins of Immunological Interest, Fifth Edition, NIH Publication 91-3242, Bethesda Md. (1991), vols. 1-3. In one embodiment, for the VL, the subgroup is subgroup kappa I as in Kabat et al., supra. In one embodiment, for the VH, the subgroup is subgroup III as in Kabat et al., supra.

### Humanized Antibody

[0345] A “humanized” antibody refers to a chimeric antibody comprising amino acid residues from non-human HVRs and amino acid residues from human FRs. In certain embodiments, a humanized antibody will comprise substantially all of at least one, and typically two, variable domains, in which all or substantially all of the HVRs (e.g., CDRs) correspond to those of a non-human antibody, and all or substantially all of the FRs correspond to those of a human antibody. A humanized antibody optionally may comprise at least a portion of an antibody constant region derived from a human antibody. A “humanized form” of an antibody, e.g., a non-human antibody, refers to an antibody that has undergone humanization.

### Hypervariable Region

[0346] The term “hypervariable region,” “HVR,” or “CDR” as used herein refers to each of the regions of an antibody variable domain which are hypervariable in sequence (“complementarity determining regions” or “complementarity determining regions”) and/or form structurally defined loops (“hypervariable loops”) and/or contain the antigen-contacting residues (“antigen contacts”). Generally, antibodies comprise six CDRs: three in the VH (H1, H2, H3), and three in the VL (L1, L2, L3). Exemplary CDRs herein include:
[0347] (a) hypervariable loops occurring at amino acid residues 26-32 (L1), 50-52 (L2), 91-96 (L3), 26-32 (H1), 53-55 (H2), and 96-101 (H3) (Chothia and Lesk, J. Mol. Biol. 196:901-917 (1987));
[0348] (b) CDRs occurring at amino acid residues 24-34 (L1), 50-56 (L2), 89-97 (L3), 31-35b (H1), 50-65 (H2), and 95-102 (H3) (Kabat et al., Sequences of Proteins of Immunological Interest, 5th Ed. Public Health Service, National Institutes of Health, Bethesda, Md. (1991));
[0349] (c) antigen contacts occurring at amino acid residues 27c-36 (L1), 46-55 (L2), 89-96 (L3), 30-35b (H1), 47-58 (H2), and 93-101 (H3) (MacCallum et al. J. Mol. Biol. 262: 732-745 (1996)); and
[0350] (d) combinations of (a), (b), and/or (c), including amino acid residues 46-56 (L2), 47-56 (L2), 48-56 (L2), 49-56 (L2), 26-35 (H1), 26-35b (H1), 49-65 (H2), 93-102 (H3), and 94-102 (H3).

[0351] Unless otherwise indicated, CDR residues and other residues in the variable domain (e.g., FR residues) are numbered herein according to Kabat et al., supra.

### Individual

[0352] An “individual,” “subject,” or “patient” is a mammal. Mammals include, but are not limited to, domesticated animals (e.g., cows, sheep, cats, dogs, and horses), primates (e.g., humans and non-human primates such as monkeys), rabbits, and rodents (e.g., mice and rats). In certain embodiments, the individual or subject is a human

### Isolated Antigen-Binding Molecule

[0353] An “isolated” antigen-binding molecule is one which has been separated from a component of its natural environment. In some embodiments, an antigen-binding molecule is purified to greater than 95% or 99% purity as determined by, for example, electrophoretic (e.g., SDS-PAGE, isoelectric focusing (IEF), capillary electrophoresis) or chromatographic (e.g., ion exchange or reverse phase HPLC). For review of methods for assessment of antibody purity, see, e.g., Flatman et al., J. Chromatogr. B 848:79-87 (2007).

### Isolated Nucleic Acid

[0354] An “isolated” nucleic acid refers to a nucleic acid molecule that has been separated from a component of its natural environment. An isolated nucleic acid includes a nucleic acid molecule contained in cells that ordinarily contain the nucleic acid molecule, but the nucleic acid molecule is present extrachromosomally or at a chromosomal location that is different from its natural chromosomal location.

### Isolated Nucleic Acid Encoding an Antigen-Binding Molecule

[0355] “Isolated nucleic acid encoding an antigen-binding molecule” refers to one or more nucleic acid molecules encoding one or two or more polypeptide chains or fragments thereof of an antigen-binding molecule (in case of an antibody, antibody heavy and light chains or fragments thereof), including such nucleic acid molecule(s) in a single vector or separate vectors, and such nucleic acid molecule(s) present at one or more locations in a host cell.

### Monoclonal Antibody

[0356] The term “monoclonal antibody” as used herein refers to an antibody obtained from a population of substantially homogeneous antibodies, i.e., the individual antibodies composing the population are identical and/or bind the same epitope, except for possible variant antibodies, e.g., containing naturally occurring mutations or arising during production of a monoclonal antibody preparation, such variants generally being present in minor amounts. In contrast to polyclonal antibody preparations, which typically include different antibodies directed against different determinants (epitopes), each monoclonal antibody of a monoclonal antibody preparation is directed against a single determinant on an antigen. Thus, the modifier “monoclonal” indicates the character of the antibody as being obtained from a substantially homogeneous population of antibodies, and is not to be construed as requiring production of the antibody by any particular method. For example, the monoclonal antibodies to be used in accordance with the present invention may be made by a variety of techniques, including but not limited to the hybridoma method, recombinant DNA methods, phage-display methods, and methods utilizing transgenic animals containing all or part of the human immunoglobulin loci, such methods and other exemplary methods for making monoclonal antibodies being described herein.

### Package Insert

[0357] The term “package insert” is used to refer to instructions customarily included in commercial packages of therapeutic products, that contain information about the indications, usage, dosage, administration, combination therapy, contraindications and/or warnings concerning the use of such therapeutic products.

### Amino Acid Sequence Identity

[0358] “Percent (%) amino acid sequence identity” with respect to a reference polypeptide sequence is defined as the percentage of amino acid residues in a candidate sequence that are identical with the amino acid residues in the reference polypeptide sequence, after aligning the sequences and introducing gaps, if necessary, to achieve the maximum percent sequence identity, and not considering any conservative substitutions as part of the sequence identity. Alignment for purposes of determining percent amino acid sequence identity can be achieved in various ways that are within the skill in the art, for instance, using publicly available computer software such as BLAST, BLAST-2, ALIGN, Megalign (DNASTAR) software, or GENETYX (registered trademark) (Genetyx Co., Ltd.). Those skilled in the art can determine appropriate parameters for aligning sequences, including any algorithms needed to achieve maximal alignment over the full length of the sequences being compared.

[0359] The ALIGN-2 sequence comparison computer program was authored by Genentech, Inc., and the source code has been filed with user documentation in the U.S. Copyright Office, Washington D.C., 20559, where it is registered under U.S. Copyright Registration No. TXU510087. The ALIGN-2 program is publicly available from Genentech, Inc., South San Francisco, Calif., or may be compiled from the source code. The ALIGN-2 program should be compiled for use on a UNIX operating system (UNIX is a registered trademark), including digital UNIX V4.0D. All sequence comparison parameters are set by the ALIGN-2 program and do not vary.

[0360] In situations where ALIGN-2 is employed for amino acid sequence comparisons, the % amino acid sequence identity of a given amino acid sequence A to, with, or against a given amino acid sequence B (which can alternatively be phrased as a given amino acid sequence A that has or comprises a certain % amino acid sequence identity to, with, or against a given amino acid sequence B) is calculated as follows:

100 times the fraction X/Y

where X is the number of amino acid residues scored as identical matches by the sequence alignment program ALIGN-2 in that program's alignment of A and B, and where Y is the total number of amino acid residues in B. It will be appreciated that where the length of amino acid sequence A is not equal to the length of amino acid sequence B, the % amino acid sequence identity of A to B will not equal the % amino acid sequence identity of B to A. Unless specifically stated otherwise, all % amino acid sequence identity values used herein are obtained as described in the immediately preceding paragraph using the ALIGN-2 computer program.

### Pharmaceutical Formulation

[0361] The term “pharmaceutical formulation” refers to a preparation which is in such form as to permit the biological activity of an active ingredient contained therein to be effective, and which contains no additional components which are unacceptably toxic to a subject to which the formulation would be administered.

### Pharmaceutically Acceptable Carrier

[0362] A “pharmaceutically acceptable carrier” refers to an ingredient in a pharmaceutical formulation, other than an active ingredient, which is nontoxic to a subject. A pharmaceutically acceptable carrier includes, but is not limited to, a buffer, excipient, stabilizer, or preservative.

### Treatment

[0363] As used herein, “treatment” (and grammatical variations thereof such as “treat” or “treating”) refers to clinical intervention in an attempt to alter the natural course of the individual being treated, and can be performed either for prophylaxis or during the course of clinical pathology. Desirable effects of treatment include, but are not limited to, preventing occurrence or recurrence of disease, alleviation of symptoms, diminishment of any direct or indirect pathological consequences of the disease, preventing metastasis, decreasing the rate of disease progression, amelioration or palliation of the disease state, and remission or improved prognosis. In some embodiments, antibodies of the invention are used to delay development of a disease or to slow the progression of a disease.

### Variable Region

[0364] The term “variable region” or “variable domain” refers to the domain of an antibody heavy or light chain that is involved in binding the antibody to antigen. The variable domains of the heavy chain and light chain (VH and VL, respectively) of a native antibody generally have similar structures, with each domain comprising four conserved framework regions (FRs) and three hypervariable regions (HVRs). (See, e.g., Kindt et al. Kuby Immunology, 6^{th} ed., W.H. Freeman and Co., page 91 (2007).) A single VH or VL domain may be sufficient to confer antigen-binding specificity. Furthermore, antibodies that bind a particular antigen may be isolated using a VH or VL domain from an antibody that binds the antigen to screen a library of complementary VL or VH domains, respectively. See, e.g., Portolano et al., J. Immunol. 150:880-887 (1993); Clarkson et al., Nature 352:624-628 (1991).

### Vector

[0365] The term “vector,” as used herein, refers to a nucleic acid molecule capable of propagating another nucleic acid to which it is linked. The term includes the vector as a self-replicating nucleic acid structure as well as the vector incorporated into the genome of a host cell into which it has been introduced. Certain vectors are capable of directing the expression of nucleic acids to which they are operatively linked. Such vectors are referred to herein as “expression vectors.”

### Multispecific Antibody

[0366] In certain embodiments, an antigen-binding molecule (or antibody) provided herein is a multispecific antibody, e.g. a bispecific antibody. Multispecific antibodies are monoclonal antibodies that have binding specificities for at least two different sites. Multispecific antibodies (e.g., bispecific antibodies) can be prepared as full length antibodies or antibody fragments.

[0367] Techniques for making multispecific antibodies include, but are not limited to, recombinant co-expression of two immunoglobulin heavy chain-light chain pairs having different specificities (see Milstein and Cuello, Nature 305: 537 (1983)), WO 93/08829, and Traunecker et al., EMBO J. 10: 3655 (1991)), and “knob-in-hole” engineering (see, e.g., U.S. Pat. No. 5,731,168). Multi-specific antibodies may also be made by engineering electrostatic steering effects for making antibody Fc-heterodimeric molecules (WO 2009/089004A1); cross-linking two or more antibodies or fragments (see, U.S. Pat. No. 4,676,980, and Brennan et al., Science, 229: 81 (1985)); using leucine zippers to produce bi-specific antibodies (see, Kostelny et al., J. Immunol., 148(5):1547-1553 (1992)); using “diabody” technology for making bispecific antibody fragments (see, Hollinger et al., Proc. Natl. Acad. Sci. USA, 90:6444-6448 (1993)); and using single-chain Fv (scFv) dimers (see, Gruber et al., J. Immunol., 152:5368 (1994)); and preparing trispecific antibodies as described, e.g., in Tutt et al. J. Immunol. 147: 60 (1991).

[0368] Engineered antibodies with three or more functional antigen binding sites, including “Octopus antibodies,” are also included herein (see, e.g. US 2006/0025576A1).

[0369] The antigen-binding molecule or fragment herein also includes a “Dual Acting Fab” or “DAF” comprising an antigen binding site that binds to a specific antigen as well as another, different antigen (see, US 2008/0069820, for example).

### II. Anti-T Cell Antigen-Binding Molecules and Pharmaceutical Compositions

[0370] In one embodiment, “anti-T cell antigen-binding molecules” refer to antigen-binding molecules that bind to antigens on T cells, and include antigen-binding molecules that bind to T cell receptor complexes. In one embodiment, anti-T cell antigen-binding molecules are multispecific antigen-binding molecules. In one embodiment, anti-T cell antigen-binding molecules are bispecific antigen-binding molecules, preferably bispecific antibodies comprising “a domain comprising an antibody variable region having T cell receptor complex-binding activity” and “a domain comprising an antibody variable region having cancer antigen-binding activity”. In one embodiment, the bispecific antibodies may have a structure of a single chain antibody, such as a structure in which antibody variable regions are linked by linkers. In one embodiment, anti-T cell antigen-binding molecules further comprise an Fc region with reduced Fcγ receptor-binding activity.

[0371] Furthermore, in one embodiment, a domain comprising an antibody variable region having T cell receptor complex-binding activity is preferably a domain comprising an antibody variable region having T cell receptor-binding activity, and more preferably a domain comprising an antibody variable region having CD3-binding activity. Furthermore, in one embodiment, the above “domain comprising an antibody variable region” is provided by one or more variable domains of an antibody, and preferably the domain comprising an antibody variable region comprises an antibody light chain variable region (VL) and an antibody heavy chain variable region (VH). Suitable examples of such domains comprising antibody variable regions include various antibody fragments such as “scFv (single chain Fv)”, “single chain antibody”, “Fv”, “single chain Fv 2 (scFv2)”, “Fab”, and “F(ab′)2”.

### Domain Comprising an Antibody Variable Region Having Cancer Antigen-Binding Activity

[0372] Herein, the “domain comprising an antibody variable region having cancer antigen-binding activity” refers to a portion of an antibody comprising a region that specifically binds to and is complementary to all or a part of a cancer antigen.

### Cancer-Specific Antigen

[0373] Herein, a “cancer-specific antigen” refers to an antigen expressed by cancer cells, which enables one to distinguish between cancer cells and healthy cells; and for example, it includes antigens that are expressed as cells become malignant, or abnormal sugar chains that appear on protein molecules or cell surface when cells become cancerous. Specific examples include GPC3; ALK receptor (pleiotrophin receptor); pleiotrophin; KS ¼ pancreas carcinoma antigen; ovarian carcinoma antigen (CA125); prostatic acid phosphate; prostate-specific antigen (PSA); melanoma-associated antigen p97; melanoma antigen gp75; high molecular weight melanoma antigen (HMW-MAA); prostate-specific membrane antigen; carcinoembryonic antigen (CEA); polymorphic epithelial mucin antigen; human milk fat globule antigen; colorectal tumor-associated antigens such as CEA, TAG-72, CO17-1A, GICA 19-9, CTA-1, and LEA; Burkitt's lymphoma antigen-38.13; CD19; human B-lymphoma antigen-CD20; CD33; melanoma-specific antigens such as ganglioside GD2, ganglioside GD3, ganglioside GM2, and ganglioside GM3; tumor-specific transplantation type cell-surface antigen (TSTA); virus-induced tumor antigens including T antigen and envelope antigens of DNA tumor viruses and RNA tumor viruses; CEA of colon; oncofetal antigens such as 5T4 oncofetal trophoblast glycoprotein and bladder tumor oncofetal antigen; α-fetoprotein; differentiation antigens such as human lung carcinoma antigens L6 and L20; antigens of fibrosarcoma; human leukemia T cell antigen-Gp37; neoglycoprotein; sphingolipids; breast cancer antigens such as EGFR (epidermal growth factor receptor); NY-BR-16; NY-BR-16 and HER2 antigen (p185HER2); polymorphic epithelial mucin (PEM); malignant human lymphocyte antigen-APO-1; differentiation antigens such as I antigen found in fetal erythrocytes; primary endoderm I antigen found in adult erythrocytes; preimplantation embryos; I(Ma) found in gastric cancer; M18 and M39 found in mammary epithelium; SSEA-1, VEP8, VEP9, My1, and VIM-D5 found in myeloid cells; D156-22 found in colorectal cancer; TRA-1-85 (blood group H); SCP-1 found in testis and ovarian cancer; C14 found in colon cancer; F3 found in lung cancer; AH6 found in gastric cancer; Y hapten; Ley found in embryonal carcinoma cells; TL5 (blood group A); EGF receptor found in A431 cells; E1 series (blood group B) found in pancreatic cancer; FC10.2 found in embryonal carcinoma cells; gastric cancer antigen; CO-514 (blood group Lea) found in adenocarcinomas; NS-10 found in adenocarcinomas; CO-43 (blood group Leb); G49 found in EGF receptor of A431 cells; MH2 (blood group ALeb/Ley) found in colon cancer; 19.9 found in colon cancer; gastric cancer mucins; T5A7 found in myeloid cells; R24 found in melanoma; 4.2, GD3, D1.1, OFA-1, GM2, OFA-2, GD2, and M1:22:25:8 found in embryonal carcinoma cells as well as SSEA-3 and SSEA-4 found in 4 to 8-cell stage embryos; subcutaneous T cell lymphoma antigen; MART-1 antigen; sialyl Tn (STn) antigen; colon cancer antigen NY-CO-45; lung cancer antigen NY-LU-12 variant A; adenocarcinoma antigen ART1; paraneoplastic associated brain-testis-cancer antigen (onconeuronal antigen MA2; paraneoplastic neuronal antigen); Neuro-oncological ventral antigen 2 (NOVA2); hemocyte carcinoma antigen gene 520; tumor-associated antigen CO-029; tumor-associated antigens MAGE-C1 (cancer/testis antigen CT7), MAGE-B1 (MAGE-XP antigen), MAGE-B2 (DAM6), MAGE-2, MAGE-4a, MAGE-4b and MAGE-X2; Cancer-Testis Antigen (NY-EOS-1); YKL-40, fragments of any of the aforementioned polypeptides, or structures produced by modification thereof (for example, the above-mentioned modified phosphate group or sugar chain); EpCAM; EREG; CA19-9; CA15-3; sialyl SSEA-1(SLX); HER2; PSMA; CEA; and CLEC12A. Cancer-specific antigens which become targets of the cancer-specific antigen-binding domains of the present invention are, in particular, preferably those expressed on cell surface, and examples of such cancer-specific antigens include CD19, CD20, EGFR, HER2, EpCAM, and EREG.

### A Domain Comprising an Antibody Variable Region Having Glypican 3 (GPC3)-Binding Activity

[0374] Herein, the phrase “a domain comprising an antibody variable region having glypican 3 (GPC3)-binding activity” refers to an antibody portion that comprises a region that specifically binds to the above-mentioned GPC3 protein, or to all or a portion of a partial peptide of the GPC3 protein, and is also complementary thereto.

[0375] Herein, glypican 3 (GPC3) is a protein that belongs to the glypican family, i.e., a group of heparan sulfate proteoglycans bound to cell surface via glycosylphosphatidylinositol (Filmus, J. Clin. Invest., 2001, 108, 497-501). Glypicans play an important role in cell proliferation, differentiation, and migration. GPC3 is expressed in 70% or more of hepatoma tissues obtained by surgical excision or biopsy, and is hardly or not at all expressed in neighboring nonneoplastic hepatic lesions and most adult tissues (Zhu-Zu-W, Gut, 2001, 48, 558-564, Yamauchi, Mod. Pathol., 2005, 18, 1591-1598).

### A Domain Comprising an Antibody Variable Region Having T-Cell Receptor Complex-Binding Activity

[0376] Herein, the phrase “a domain comprising an antibody variable region having T-cell receptor complex-binding activity” refers to a T-cell receptor complex-binding antibody portion that comprises a region that specifically binds to all or a portion of a T-cell receptor complex and is also complementary thereto. The T-cell receptor complex may be a T-cell receptor itself, or an adaptor molecule constituting a T-cell receptor complex along with a T-cell receptor. CD3 is suitable as an adaptor molecule.

### A Domain Comprising an Antibody Variable Region Having T-Cell Receptor-Binding Activity

[0377] Herein, the phrase “a domain comprising an antibody variable region having T-cell receptor-binding activity” refers to a T-cell receptor-binding antibody portion that comprises a region that specifically binds to all or a portion of a T-cell receptor and is also complementary thereto.

[0378] The portion of a T cell receptor to which the domain of the present invention binds may be a variable region or a constant region, but an epitope present in the constant region is preferred. Examples of the constant region sequence include the T cell receptor α chain of RefSeq Accession No. CAA26636.1 (SEQ ID NO: 9), the T cell receptor β chain of RefSeq Accession No. C25777 (SEQ ID NO: 10), the T cell receptor γ1 chain of RefSeq Accession No. A26659 (SEQ ID NO: 11), the T cell receptor γ2 chain of RefSeq Accession No. AAB63312.1 (SEQ ID NO: 12), and the T cell receptor δ chain of RefSeq Accession No. AAA61033.1 (SEQ ID NO: 13).

### A Domain Comprising an Antibody Variable Region Having CD3-Binding Activity

[0379] Herein, the phrase “a domain comprising an antibody variable region having CD3-binding activity” refers to a CD3-binding antibody portion that comprises a region that specifically binds to all or a portion of CD3 and is also complementary thereto.

[0380] The domain comprising an antibody variable region having CD3-binding activity of the present invention may be any epitope-binding domain as long as the epitope exists in the γ-chain, δ-chain, or ε-chain sequence that constitutes human CD3. In the present invention, preferably, a domain comprising an anti-CD3 antibody light-chain variable region (VL) and an anti-CD3 antibody heavy-chain variable region (VH) that bind to an epitope present in the extracellular region of the ε chain of the human CD3 complex is suitably used. Besides the anti-CD3 antibody light chain variable region (VL) and anti-CD3 antibody heavy chain variable region (VH) described in the Examples, various known CD3-binding domains containing a CD3-binding antibody light chain variable region (VL) and a CD3-binding antibody heavy chain variable region (VH), and those of the OKT3 antibody (Proc. Natl. Acad. Sci. USA (1980) 77, 4914-4917) are suitably used as such domains. One may appropriately use an antibody variable region-containing domain derived from the anti-CD3 antibody having desired properties, which is obtained by immunizing a desired animal by the above-mentioned method using the γ-chain, δ-chain, or ε-chain constituting the human CD3. Human antibodies and properly humanized antibodies as described above may be appropriately used as the anti-CD3 antibody to give rise to the domain containing the antibody variable region having CD3-binding activity. Regarding the structure of the γ-chain, δ-chain, or ε-chain constituting CD3, their polynucleotide sequences are shown in SEQ ID NOs: 9 (NM_000073.2), 10 (NM_000732.4), and 11 (NM_000733.3), and their polypeptide sequences are shown in SEQ ID NOs: 12 (NP_000064.1), 13 (NP_000723.1), and 14 (NP_000724.1) (the RefSeq accession number is shown in parentheses).

[0381] Antibody variable region-containing domains in antigen binding molecules of the present invention may bind to the same epitope. Herein, the same epitope may be present in a protein comprising the amino acid sequence of SEQ ID NO: 2 or 14. Alternatively, antibody variable region-containing domains in antigen binding molecules of the present invention may bind to different epitopes, respectively. Herein, the different epitopes may be present in a protein comprising the amino acid sequence of SEQ ID NO: 2 or 14.

Fc Region with Reduced Fcγ Receptor-Binding Activity

[0382] In one embodiment, “Fcγ receptor-binding activity is reduced” means, for example, that the binding activity of a test antigen-binding molecule is 50% or less, preferably 45% or less, 40% or less, 35% or less, 30% or less, 20% or less, or 15% or less, and particularly preferably 10% or less, 9% or less, 8% or less, 7% or less, 6% or less, 5% or less, 4% or less, 3% or less, 2% or less, or 1% or less than the binding activity of a control antigen-binding molecule.

[0383] Antigen-binding molecules comprising the Fc region of a monoclonal IgG1, IgG2, IgG3, or IgG4 antibody can be appropriately used as control antigen-binding molecules. Furthermore, when an antigen-binding molecule comprising an Fc region mutant of an antibody of a particular isotype is used as a test substance, the effect of the mutation of the mutant on the Fcγ receptor-binding activity is assessed using as a control an antigen-binding molecule comprising an Fc region of the same isotype. As described above, antigen-binding molecules comprising an Fc region mutant whose Fcγ receptor-binding activity has been judged to be reduced are appropriately prepared.

[0384] Such known mutants include, for example, mutants having a deletion of amino acids 231A-238S (EU numbering) (WO 2009/011941), as well as mutants C226S, C229S, P238S, (C220S) (J. Rheumatol (2007) 34, 11); C226S and C229S (Hum. Antibod. Hybridomas (1990) 1(1), 47-54); C226S, C229S, E233P, L234V, and L235A (Blood (2007) 109, 1185-1192).

[0385] Specifically, the preferred antigen-binding molecules include those comprising an Fc region with a substitution of the amino acid at position 220, 226, 229, 231, 232, 233, 234, 235, 236, 237, 238, 239, 240, 264, 265, 266, 267, 269, 270, 295, 296, 297, 298, 299, 300, 325, 327, 328, 329, 330, 331, or 332 (EU numbering) in the amino acids forming the Fc region of an antibody of a particular isotype. The isotype of antibody from which the Fc region originates is not particularly limited, and it is possible to use an appropriate Fc region derived from a monoclonal IgG1, IgG2, IgG3, or IgG4 antibody. It is preferable to use Fc regions derived from IgG1 antibodies.

[0386] Suitably used antigen-binding molecules include, for example, those comprising an Fc region which has any one of the substitutions shown below, whose positions are specified according to EU numbering (each number represents the position of an amino acid residue in the EU numbering; and the one-letter amino acid symbol before the number represents the amino acid residue before substitution, while the one-letter amino acid symbol after the number represents the amino acid residue before the substitution) in the amino acids forming the Fc region of IgG1 antibody:

[0387] (a) L234F, L235E, P331S;

[0388] (b) C226S, C229S, P238S;

[0389] (c) C226S, C229S;

[0390] (d) C226S, C229S, E233P, L234V, L235A;

[0391] (e) L234A, L235A or L235R, N297A;

[0392] (f) L235A or L235R, S239K, N297A

as well as those having an Fc region which has a deletion of the amino acid sequence at positions 231 to 238.

[0393] Furthermore, suitably used antigen-binding molecules also include those comprising an Fc region that has any one of the substitutions shown below, whose positions are specified according to EU numbering in the amino acids forming the Fc region of an IgG2 antibody:

[0394] (g) H268Q, V309L, A330S, and P331S;

[0395] (h) V234A;

[0396] (i) G237A;

[0397] (j) V234A and G237A;

[0398] (k) A235E and G237A;

[0399] (l) V234A, A235E, and G237A (each number represents the position of an amino acid residue in EU numbering; and the one-letter amino acid symbol before the number represents the amino acid residue before substitution, while the one-letter amino acid symbol after the number represents the amino acid residue before the substitution).

[0400] Furthermore, suitably used antigen-binding molecules also include those comprising an Fc region that has any one of the substitutions shown below, whose positions are specified according to EU numbering in the amino acids forming the Fc region of an IgG3 antibody:

[0401] (m) F241A;

[0402] (n) D265A;

[0403] (o) V264A (each number represents the position of an amino acid residue in EU numbering; and the one-letter amino acid symbol before the number represents the amino acid residue before substitution, while the one-letter amino acid symbol after the number represents the amino acid residue before the substitution).

[0404] Furthermore, suitably used antigen-binding molecules also include those comprising an Fc region that has any one of the substitutions shown below, whose positions are specified according to EU numbering in the amino acids forming the Fc region of an IgG4 antibody:

[0405] (p) L235A, G237A, and E318A;

[0406] (q) L235E;

[0407] (r) F234A and L235A (each number represents the position of an amino acid residue in EU numbering; and the one-letter amino acid symbol before the number represents the amino acid residue before substitution, while the one-letter amino acid symbol after the number represents the amino acid residue before the substitution).

[0408] Other preferred antigen-binding molecules include, for example, those comprising an Fc region in which any amino acid at position 233, 234, 235, 236, 237, 327, 330, or 331 (EU numbering) in the amino acids forming the Fc region of an IgG1 antibody is substituted with an amino acid of the corresponding position in EU numbering in the corresponding IgG2 or IgG4.

[0409] Other preferred antigen-binding molecules also include, for example, those comprising an Fc region in which any one or more of the amino acids at positions 234, 235, and 297 (EU numbering) in the amino acids forming the Fc region of an IgG1 antibody is substituted with other amino acids. The type of amino acid after substitution is not particularly limited; however, antigen-binding molecules comprising an Fc region in which any one or more of the amino acids at positions 234, 235, and 297 are substituted with alanine are particularly preferred.

[0410] Other preferred antigen-binding molecules also include, for example, those comprising an Fc region in which an amino acid at position 265 (EU numbering) in the amino acids forming the Fc region of an IgG1 antibody is substituted with another amino acid. The type of amino acid after substitution is not particularly limited; however, antigen-binding molecules comprising an Fc region in which the amino acid at position 265 is substituted with alanine are particularly preferred.

### Anti-Glypican 3 (GPC3)/T-Cell Receptor Complex Bispecific Antibody

[0411] In one embodiment, an anti-T cell antigen-binding molecule is a bispecific antibody comprising:
[0412] (1) a domain comprising an antibody variable region having glypican 3-binding activity;
[0413] (2) a domain comprising an antibody variable region having T-cell receptor complex-binding activity; and
[0414] (3) a domain comprising an Fc region with reduced Fcγ receptor-binding activity.
   In one embodiment, for the antibody L-chain variable regions contained in the antibody variable region having glypican 3-binding activity and the antibody variable region having T-cell receptor complex-binding activity of the present invention, it is preferable to obtain a common L chain that may provide a binding ability both to the H chain having glypican3-binding activity and to the H chain having T-cell receptor complex-binding activity, and to use this as the common L-chain variable region of the bispecific antigen-binding molecule.

[0415] Examples of a preferred antibody H-chain variable region of the present disclosure contained in the antibody variable region having glypican 3-binding activity comprises the antibody H-chain variable regions of Table 1, or antibody H-chain variable regions having CDR sequences whose CDR1, CDR2, and CDR3 amino acid sequences are the same as the CDR1, CDR2, and CDR3 amino acid sequences contained in the antibody H-chain variable regions of Table 1, or antibody H-chain variable regions which are functionally equivalent to the above-mentioned variable regions.

TABLE 1

| Sequence Name | SEQ ID NO: |
|---|---|
| H0000 | 40 |
| GCH003 | 170 |
| GCH005 | 171 |
| GCH006 | 172 |
| GCH007 | 173 |
| GCH008 | 174 |
| GCH010 | 175 |
| GCH012 | 176 |
| GCH013 | 177 |
| GCH014 | 178 |
| GCH015 | 179 |
| GCH016 | 180 |
| GCH019 | 181 |
| GCH022 | 182 |
| GCH023 | 183 |
| GCH025 | 184 |
| GCH026 | 185 |
| GCH027 | 186 |
| GCH029 | 187 |
| GCH032 | 188 |
| GCH034 | 189 |
| GCH035 | 190 |
| GCH039 | 191 |
| GCH040 | 192 |
| GCH042 | 193 |
| GCH043 | 194 |
| GCH045 | 195 |
| GCH053 | 196 |
| GCH054 | 197 |
| GCH055 | 198 |
| GCH056 | 199 |
| GCH057 | 200 |
| GCH059 | 201 |
| GCH060 | 202 |
| GCH061 | 203 |
| GCH062 | 204 |
| GCH064 | 205 |
| GCH065 | 206 |
| GCH066 | 207 |
| GCH067 | 208 |
| GCH068 | 209 |
| GCH073 | 210 |
| GCH094 | 211 |
| GCH098 | 212 |
| GCH099 | 213 |
| GCH100 | 214 |
| H0610 | 215 |

[0416] Examples of a preferred antibody variable region having T-cell receptor complex-binding activity in the present disclosure include antibody variable regions having T-cell receptor-binding activity. Of the T-cell receptors, CD3 is preferred, and CD3E is particularly preferred. Examples of an antibody H-chain variable region contained in such antibody variable regions include the antibody H-chain variable regions of Table 2, antibody H-chain variable regions having CDR sequences whose CDR1, CDR2, and CDR3 amino acid sequences are the same as the CDR1, CDR2, and CDR3 amino acid sequences contained in the antibody H-chain variable regions of Table 2, and antibody H-chain variable regions that are functionally equivalent to the above-mentioned variable regions.

TABLE 2

| Sequence Name | SEQ ID NO: |
|---|---|
| hCE115HA | 52 |
| CE115HA177 | 64 |
| CE115HA178 | 65 |
| CE115HA179 | 66 |
| CE115HA180 | 67 |
| hCE115HAa | 68 |
| TR01H006 | 69 |
| TR01H007 | 70 |
| TR01H008 | 71 |
| TR01H009 | 72 |
| TR01H010 | 73 |
| TR01H011 | 74 |
| TR01H012 | 75 |
| TR01H013 | 76 |
| TR01H014 | 77 |
| TR01H015 | 78 |
| TR01H016 | 79 |
| TR01H017 | 80 |
| TR01H018 | 81 |
| TR01H019 | 82 |
| TR01H020 | 83 |
| TR01H021 | 84 |
| TR01H022 | 85 |
| TR01H023 | 86 |
| TR01H024 | 87 |
| TR01H025 | 88 |
| TR01H026 | 89 |
| TR01H027 | 90 |
| TR01H028 | 91 |
| TR01H029 | 92 |
| TR01H030 | 93 |
| TR01H031 | 94 |
| TR01H032 | 95 |
| TR01H033 | 96 |
| TR01H034 | 97 |
| TR01H035 | 98 |
| TR01H036 | 99 |
| TR01H037 | 100 |
| TR01H038 | 101 |
| TR01H039 | 102 |
| TR01H040 | 103 |
| TR01H041 | 104 |
| TR01H042 | 105 |
| TR01H043 | 106 |
| TR01H044 | 107 |
| TR01H045 | 108 |
| TR01H046 | 109 |
| TR01H047 | 110 |
| TR01H048 | 111 |
| TR01H049 | 112 |
| TR01H050 | 113 |
| TR01H051 | 114 |
| TR01H052 | 115 |
| TR01H053 | 116 |
| TR01H054 | 117 |
| TR01H055 | 118 |
| TR01H056 | 119 |
| TR01H057 | 120 |
| TR01H058 | 121 |
| TR01H061 | 122 |
| TR01H062 | 123 |
| TR01H063 | 124 |
| TR01H064 | 125 |
| TR01H065 | 126 |
| TR01H066 | 127 |
| TR01H067 | 128 |
| TR01H068 | 129 |
| TR01H069 | 130 |
| TR01H070 | 131 |
| TR01H071 | 132 |
| TR01H072 | 133 |
| TR01H073 | 134 |
| TR01H074 | 135 |
| TR01H075 | 136 |
| TR01H076 | 137 |
| TR01H077 | 138 |
| TR01H079 | 139 |
| TR01H080 | 140 |
| TR01H081 | 141 |
| TR01H082 | 142 |
| TR01H083 | 143 |
| TR01H084 | 144 |
| TR01H090 | 145 |
| TR01H091 | 146 |
| TR01H092 | 147 |
| TR01H093 | 148 |
| TR01H094 | 149 |
| TR01H095 | 150 |
| TR01H096 | 151 |
| TR01H097 | 152 |
| TR01H098 | 153 |
| TR01H099 | 154 |
| TR01H100 | 155 |
| TR01H101 | 156 |
| TR01H102 | 157 |
| TR01H103 | 158 |
| TR01H104 | 159 |
| TR01H105 | 160 |
| TR01H106 | 161 |
| TR01H107 | 162 |
| TR01H108 | 163 |
| TR01H109 | 164 |
| TR01H110 | 165 |
| TR01H111 | 166 |
| TR01H112 | 167 |
| TR01H113 | 168 |
| TR01H114 | 169 |
| TR01H001 | 420 |
| TR01H002 | 421 |
| TR01H003 | 422 |
| TR01H004 | 423 |
| rCE115H | 424 |
| CE115HA121 | 425 |
| CE115HA122 | 426 |
| CE115HA124 | 427 |
| CE115HA192 | 428 |
| CE115HA236 | 429 |
| CE115HA251 | 430 |
| CE115HA252 | 431 |

[0417] The relationship between the CDR regions of the amino acid residues constituting the antibody H chain amino acid sequence and Kabat numbering is as shown in FIG. 2.

[0418] Examples of the common L-chain variable region to be used in the present invention include the L-chain variable regions of Table 3, antibody L-chain variable regions having CDR sequences whose CDR1, CDR2, and CDR3 amino acid sequences are the same as the CDR1, CDR2, and CDR3 amino acid sequences contained in the antibody L-chain variable regions of Table 3, and antibody L-chain variable regions that are functionally equivalent to the above-mentioned variable regions.

TABLE 3

| Sequence Name | SEQ ID NO: |
|---|---|
| L0000 | 53 |
| L0002 | 217 |
| L0003 | 218 |
| L0006 | 219 |
| L0007 | 220 |
| L0008 | 221 |
| L0009 | 222 |
| L0011 | 223 |
| L0012 | 224 |
| L0013 | 225 |
| L0014 | 226 |
| L0015 | 227 |
| L0016 | 228 |
| L0032 | 229 |
| L0038 | 230 |
| L0039 | 231 |
| L0041 | 232 |
| L0042 | 233 |
| L0043 | 234 |
| L0044 | 235 |
| L0045 | 236 |
| L0046 | 237 |
| L0047 | 238 |
| L0062 | 239 |
| L0063 | 240 |
| L0064 | 241 |
| L0065 | 242 |
| L0066 | 243 |
| L0069 | 244 |
| L0075 | 245 |
| L0079 | 246 |
| L0082 | 247 |
| L0085 | 248 |
| L0089 | 249 |
| L0090 | 250 |
| L0091 | 251 |
| L0093 | 252 |
| L0104 | 253 |
| L0106 | 254 |
| L0107 | 255 |
| L0109 | 256 |
| L0113 | 257 |
| L0115 | 258 |
| L0117 | 259 |
| L0120 | 260 |
| L0122 | 261 |
| L0123 | 262 |
| L0124 | 263 |
| L0125 | 264 |
| L0126 | 265 |
| L0127 | 266 |
| L0129 | 267 |
| L0132 | 268 |
| L0134 | 269 |
| L0136 | 270 |
| L0137 | 271 |
| L0138 | 272 |
| L0139 | 273 |
| L0140 | 274 |
| L0141 | 275 |
| L0143 | 276 |
| L0144 | 277 |
| L0145 | 278 |
| L0147 | 279 |
| L0148 | 280 |
| L0149 | 281 |
| L0151 | 282 |
| L0152 | 283 |
| L0154 | 284 |
| L0155 | 285 |
| L0157 | 286 |
| L0160 | 287 |
| L0161 | 288 |
| L0163 | 289 |
| L0167 | 290 |
| L0168 | 291 |
| L0173 | 292 |
| L0175 | 293 |
| L0180 | 294 |
| L0181 | 295 |
| L0186 | 296 |
| L0187 | 297 |
| L0200 | 298 |
| L0201 | 299 |
| L0202 | 300 |
| L0203 | 301 |
| L0204 | 302 |
| L0205 | 303 |
| L0206 | 304 |
| L0207 | 305 |
| L0208 | 306 |
| L0209 | 307 |
| L0210 | 308 |
| L0211 | 309 |
| L0212 | 310 |
| L0213 | 311 |
| L0214 | 312 |
| L0215 | 313 |
| L0216 | 314 |
| L0217 | 315 |
| L0218 | 316 |
| L0219 | 317 |
| L0220 | 318 |
| L0222 | 319 |
| L0223 | 320 |
| L0224 | 321 |
| L0226 | 322 |
| L0227 | 323 |
| L0228 | 324 |
| L0229 | 325 |
| L0230 | 326 |
| L0231 | 327 |
| L0232 | 328 |
| L0233 | 329 |
| L0234 | 330 |
| L0235 | 331 |
| L0236 | 332 |
| L0237 | 333 |
| L0238 | 334 |
| L0239 | 335 |
| L0240 | 336 |
| L0241 | 337 |
| L0242 | 338 |
| L0243 | 339 |
| L0246 | 340 |
| L0247 | 341 |
| L0248 | 342 |
| L0249 | 343 |
| L0250 | 344 |
| L0258 | 345 |
| L0259 | 346 |
| L0260 | 347 |
| L0261 | 348 |
| L0262 | 349 |
| L0263 | 350 |
| L0264 | 351 |
| L0265 | 352 |
| L0266 | 353 |
| L0267 | 354 |
| L0268 | 355 |
| L0269 | 356 |
| L0270 | 357 |
| L0271 | 358 |
| L0272 | 359 |

[0419] The relationship between the CDR regions of the amino acid residues constituting the antibody L-chain amino acid sequence and Kabat numbering is as shown in FIG. 4.

[0420] In a preferred embodiment, examples of a combination of the antibody variable region having glypican 3-binding activity and the antibody variable region having T-cell receptor complex binding activity include the combinations of antibody H-chain variable regions shown in Table 4, combinations of antibody H-chain variable regions having CDR sequences whose CDR1, CDR2, and CDR3 amino acid sequences are the same as the CDR1, CDR2, and CDR3 amino acid sequences contained in the antibody H-chain variable regions of Table 4, and combinations of antibody H-chain variable regions functionally equivalent to these variable regions.

TABLE 4

| GPC3 side/T cell receptor complex side | SEQ ID NO: |
|---|---|
| H0000/hCE115HA | 40/52 |
| H0000/CE115HA251 | 40/430 |
| H0000/CE115HA236 | 40/429 |
| H0000/TR01H002 | 40/421 |
| H0000/CE115HA122 | 40/426 |
| H0610/rCE115H | 215/424 |
| H0610/TR01H040 | 215/103 |
| H0610/TR01H061 | 215/122 |
| H0610/TR01H068 | 215/129 |
| H0610/TR01H071 | 215/132 |
| GCH054/TR01H067 | 197/128 |
| GCH094/TR01H082 | 211/142 |
| GCH094/TR01H084 | 211/144 |
| GCH065/TR01H084 | 206/144 |
| GCH065/TR01H082 | 206/142 |
| GCH094/TR01H109 | 211/164 |
| GCH065/TR01H109 | 206/164 |
| GCH094/TR01H113 | 211/168 |
| GCH065/TR01H113 | 206/168 |

[0421] A preferred common L chain for the above combinations of an antibody variable region having glypican 3-binding activity and an antibody variable region having T-cell receptor complex binding activity includes, for example, L0000, L0011, L0201, L0203, L0204, L0206, L0208, L0209, L0211, L0212, L0222, and common L chains having CDR sequences whose CDR1, CDR2, and CDR3 amino acid sequences are identical to the CDR1, CDR2, and CDR3 amino acid sequences of these common L chains. Specific preferred combinations include, for example, the combinations of antibody H-chain variable regions and a common L chain shown in Table 5, combinations of antibody variable regions having CDR sequences whose CDR1, CDR2, and CDR3 amino acid sequences are identical to the amino acid sequences of CDR1, CDR2, and CDR3 carried by the antibody variable regions and a common L chain of Table 5, and combinations of antibody H-chain variable regions and a common L chain functionally equivalent to these variable regions.

TABLE 5

| GPC3 side/T cell receptor complex side/common L chain | SEQ ID NO: |
|---|---|
| H0610/rCE115H/L0000 | 215/424/53 |
| H0610/TR01H040/L0000 | 215/103/53 |
| H0610/TR01H040/L0201 | 215/103/299 |
| H0610/TR01H040/L0203 | 215/103/301 |
| H0610/TR01H040/L0204 | 215/103/302 |
| H0610/TR01H040/L0206 | 215/103/304 |
| H0610/TR01H040/L0208 | 215/103/306 |
| H0610/TR01H040/L0209 | 215/103/307 |
| H0610/TR01H040/L0211 | 215/103/309 |
| H0610/TR01H061/L0000 | 215/122/53 |
| H0610/TR01H068/L0000 | 215/129/53 |
| H0610/TR01H071/L0000 | 215/132/53 |
| GCH054/TR01H067/L0201 | 197/128/299 |
| GCH054/TR01H067/L0212 | 197/128/310 |
| GCH054/TR01H067/L0222 | 197/128/319 |
| GCH054/TR01H067/L0000 | 197/128/53 |
| GCH094/TR01H082/L0201 | 211/142/299 |
| GCH094/TR01H082/L0011 | 211/142/223 |
| GCH094/TR01H084/L0011 | 211/144/223 |
| GCH065/TR01H084/L0011 | 206/144/223 |
| GCH065/TR01H082/L0011 | 206/142/223 |
| GCH094/TR01H109/L0011 | 211/164/223 |
| GCH065/TR01H109/L0011 | 206/164/223 |
| GCH094/TR01H113/L0011 | 211/168/223 |
| GCH065/TR01H113/L0011 | 206/168/223 |

[0422] The Fc region comprised in the anti-T cell antigen-binding molecule (preferably the bispecific antibody) is not particularly limited as long as it is an Fc region having reduced Fcγ receptor-binding activity, but examples of a preferred Fc region include a combination of the Fc-region portion of E22Hh and the Fc-region portion of E22Hk, a combination of the Fc-region portion of E2702GsKsc and the Fc-region portion of E2704sEpsc, and a combination of the Fc-region portion of E2702sKsc and the Fc-region portion of E2704sEpsc.

### ERY974

[0423] In one embodiment, the anti-T cell antigen-binding molecule of the present disclosure is ERY974. ERY974 is a bispecific antibody comprising (1) a domain comprising an antibody variable region having glypican 3-binding activity, (2) a domain comprising an antibody variable region having T cell receptor complex-binding activity, and (3) a domain comprising an Fc region with reduced Fcγ receptor-binding activity. This bispecific antibody comprises TR01H113 (SEQ ID NO: 168) as the CD3-side heavy chain variable region, E2702sKsc (SEQ ID NO: 62) as the CD3-side heavy chain constant region, GCH065 (SEQ ID NO: 206) as the GPC3-side heavy chain variable region, E2704sEpsc (SEQ ID NO: 61) as the GPC3-side heavy chain constant region, L0011 (SEQ ID NO: 223) as the common light chain variable region, and k0 (SEQ ID NO: 63) as the common light chain constant region. In another embodiment, of ERY974, the CD3-side heavy chain comprises the amino acid sequence of SEQ ID NO: 402, the GPC3-side heavy chain comprises the amino acid sequence of SEQ ID NO: 385, and the common light chain comprises the amino acid sequence of SEQ ID NO: 410, respectively.

[0424] In one embodiment, amino acids contained in the amino acid sequences of the present disclosure may be subjected to post-translational modification. Modification well-known to those skilled in the art is, for example, conversion of an N-terminal glutamine residue (Q) to pyroglutamic acid (pGlu) by pyroglutamylation. Even when amino acids are post-translationally modified this way, they are, of course, included in the amino acid sequences described in the present disclosure.

[0425] Other preferred anti-T cell antigen-binding molecules in the present disclosure include bispecific antibodies having an antibody variable region having glypican 3-binding activity and an antibody variable region having CDR-binding activity. More preferably, the cytotoxic activity is equal to or higher than that of the bispecific antibody GPC3_ERY22_rCE115 (disclosed in Example 1 of WO2015156268). Examples of such bispecific antibodies include the bispecific antibody having an H chain and an L chain described in Example 3 (Table 13) of WO2015156268, or a bispecific antibody that binds to an epitope overlapping with an epitope to which the antibody binds and has an Fc region with reduced Fcγ receptor-binding activity.

[0426] In the present disclosure, the phrase “functionally equivalent” means that the binding affinities for an antigen are equivalent, or alternatively, it means that the cytotoxic activities against glypican 3-expressing cells or tissues containing these cells are equivalent when it is used as a bispecific antibody. The binding affinity and cytotoxic activity can be measured based on the description herein. The cells used for measurement of cytotoxic activity may be the desired GPC3-expressing cells or a desired tissue containing these cells, and for example, PC-10 or NCI-H446 which are GPC3-expressing human cancer cell lines can be used. Regarding the antibody constant regions, the phrase may mean that the decreases in Fcγ receptor-binding activity are equivalent.

[0427] For example, an antibody H-chain variable region functionally equivalent to the antibody H chain variable region described herein (i.e., the original H chain variable region) means that this region has the same binding affinity when it is combined with the antibody L-chain variable region described herein which forms a pair with the original H chain, or alternatively that the region has the same cytotoxic activity towards glypican 3-expressing cells or a tissue containing these cells when used for a bispecific antibody. Furthermore, an antibody L-chain variable region functionally equivalent to the antibody L-chain variable region described herein (i.e., the original L-chain variable region) means that this region has the same binding affinity when it is combined with the antibody H-chain variable region described herein which forms a pair with the original L chain, or alternatively that the region has the same cytotoxic activity towards glypican 3-expressing cells or a tissue containing these cells when used for a bispecific antibody.

[0428] The term “equivalent” does not necessarily have to mean the same degree of activity, and the activity may be enhanced. Specifically, for antigen-binding affinity, examples include the case where the value (KD value/parent KD value) obtained by comparison to the binding affinity of the antibody variable region serving as the control (parent KD value) is 1.5 or less. The value of KD value/parent KD value is preferably 1.3 or less, more preferably 1.2 or less, 1.1 or less, 1.0 or less, 0.9 or less, 0.8 or less, 0.7 or less, 0.6 or less, or 0.5 or less. While there is no lower limit, examples include 10⁻¹, 10⁻², 10⁻³, 10⁻⁴, 10⁻⁵, or 10⁻⁶. More specifically, in the present invention, the value of KD value/parent KD value is preferably 10⁻⁶ to 1.5×10⁻⁰, more preferably 10⁻⁶ to 10⁻¹, even more preferably 10⁻⁶ to 10⁻², and yet even more preferably 10⁻⁶ to 10⁻³. For cytotoxic activity, examples include the case where the value (cell growth inhibition rate/parent cell growth inhibition rate) obtained by comparison to the cell growth inhibition rate of the bispecific antibody serving as the control (parent cell growth inhibition rate) is 0.7 or more. The concentration of the added multispecific antigen-binding molecule can be determined appropriately, but is preferably, for example, 0.01 nM, 0.05 nM, 0.1 nM, 0.5 nM, or 1 nM; and preferably, measurements are taken at 0.05 nM or 0.1 nM. The value for cell growth inhibition rate/parent cell growth inhibition rate is preferably 0.8 or higher, more preferably 0.9 or higher, 1.0 or higher, 1.2 or higher, 1.5 or higher, 2 or higher, 3 or higher, 5 or higher, 10 or higher, or 20 or higher. While there is no upper limit, the value may be 10, 10², 10³, 10⁴, 10⁵, or 10⁶.

[0429] Furthermore, for cytotoxic activity, examples include the case where the value (concentration for 50% inhibition of cell growth/parent concentration for 50% inhibition of cell growth) obtained by comparison to the concentration of the original bispecific antibody for 50% inhibition of cell growth (parent concentration for 50% inhibition of cell growth) is 1.5 or less. Concentration for 50% growth inhibition refers to the concentration of the multispecific antigen-binding molecule necessary for reducing the cell proliferation rate to one half compared to when the multispecific antigen-binding molecule is not added. The value of “concentration for 50% inhibition of cell growth/parent concentration for 50% inhibition of cell growth” is preferably 1.3 or less, more preferably 1.2 or less, 1.1 or less, 1.0 or less, 0.9 or less, 0.8 or less, 0.7 or less, 0.6 or less, or 0.5 or less. While there is no lower limit, the value may be, for example, 10⁻¹, 10⁻², 10⁻³, 10⁻⁴, 10⁻⁵, or 10⁻⁶. Specifically, the value is preferably 10⁻⁶ to 1.5×10⁻⁰, more preferably 10⁻⁶ to 10⁻¹, even more preferably 10⁻⁶ to 10⁻², and yet even more preferably 10⁻⁶ to 10⁻³.

[0430] Regarding the domain comprising an antibody variable region having GPC3-binding activity, the KD value towards GPC3 (for example, human GPC3) may be, for example, 5×10⁻⁹ M or less, preferably 4×10⁻⁹ M or less, such as 3×10⁻⁹ M or less, 2×10⁻⁹ M or less, 1×10⁻⁹ M or less, 8×10⁻¹⁰ M or less, 5×10⁻¹⁰ M or less, 4×10⁻¹⁰ M or less, 3×10⁻¹⁰ M or less, 2×10⁻¹⁰ M or less, 1×10⁻¹⁰ M or less, 8×10⁻¹¹ M or less, 5×10⁻¹¹ M or less, 4×10⁻¹¹ M or less, 3×10⁻¹¹ M or less, 2×10⁻¹¹ M or less, 1×10⁻¹¹ M or less, 8×10⁻¹² M or less, 5×10⁻¹² M or less, 4×10⁻¹² M or less, 3×10⁻¹² M or less, 2×10⁻¹² M or less, 1×10⁻¹² M or less, 8×10⁻¹³ M or less, 5×10⁻¹³ M or less, 4×10⁻¹³ M or less, 3×10⁻¹³ M or less, 2×10⁻¹³ M or less, or 1×10⁻¹³ M or less.

[0431] Regarding the domain comprising an antibody variable region having T-cell receptor complex-binding activity, the KD value towards a human T-cell receptor complex such as a human T cell receptor, or more specifically for example human CD3E chain may be, for example, 2×10⁻⁷ M or less, preferably 1.5×10⁻⁷ M or less, such as 1.4×10⁻⁷ M or less, 1.3×10⁻⁷ M or less, 1.2×10⁻⁷ M or less, 1×10⁻⁷ M or less, 3×10⁻⁸ M or less, 2×10⁻⁸ M or less, 1×10⁻⁸ M or less, 8×10⁻⁹ M or less, 5×10⁻⁹ M or less, 4×10⁻⁹ M or less, 3×10⁻⁹ M or less, 2×10⁻⁹ M or less, 1×10⁻⁹ M or less, 8×10⁻¹⁰ M or less, 5×10⁻¹⁰ M or less, 4×10⁻¹⁰ M or less, 3×10⁻¹⁰ M or less, 2×10⁻¹⁰ M or less, 1×10⁻¹⁰ M or less, 8×10⁻¹¹ M or less, 5×10⁻¹¹ M or less, 4×10⁻¹¹ M or less, 3×10⁻¹¹ M or less, 2×10⁻¹¹ M or less, 1×10⁻¹¹ M or less, 8×10⁻¹² M or less, 5×10⁻¹² M or less, 4×10⁻¹² M or less, 3×10⁻¹² M or less, 2×10⁻¹² M or less, or 1×10⁻¹² M or less.

[0432] The bispecific antibodies of the present disclosure preferably have KD values toward human GPC3 and human T-cell receptor complex (for example, human CD3E chain) that are 5×10⁻⁹ M or less and 2×10⁻⁷ M or less, respectively, and more preferably 1×10⁻⁹ M or less and 5×10⁻⁸ M or less, respectively.

[0433] In the present invention, antibody variable regions that are “functionally equivalent” are not particularly limited as long as they are antibody H-chain and/or antibody L-chain variable regions that satisfy the above-described conditions. Examples of such antibody variable regions include regions produced by introducing substitution, deletion, addition, and/or insertion of one or more amino acids (for example, 1, 2, 3, 4, 5, or 10 amino acids) into the amino acid sequences of the variable regions of Tables 1 to 3 mentioned above. A method well known to those skilled in the art for introducing one or more amino-acid substitutions, deletions, additions, and/or insertions into an amino acid sequence is a method of introducing mutations into proteins. For example, those skilled in the art can prepare variable regions that are functionally equivalent to the antibody variable regions having the above-mentioned functions by appropriately introducing mutations into amino acid sequences using methods such as site-directed mutagenesis (Hashimoto-Gotoh, T., Mizuno, T., Ogasahara, Y., and Nakagawa, M. (1995) An oligodeoxyribonucleotide-directed dual amber method for site-directed mutagenesis. Gene 152, 271-275; Zoller, M. J., and Smith, M. (1983) Oligonucleotide-directed mutagenesis of DNA fragments cloned into M13 vectors. Methods Enzymol. 100, 468-500; Kramer, W., Drutsa, V., Jansen, H. W., Kramer, B., Pflugfelder, M., and Fritz, H. J. (1984) The gapped duplex DNA approach to oligonucleotide-directed mutation construction. Nucleic Acids Res. 12, 9441-9456; Kramer, W., and Fritz, H. J. (1987) Oligonucleotide-directed construction of mutations via gapped duplex DNA Methods. Enzymol. 154, 350-367; and Kunkel, T. A. (1985) Rapid and efficient site-specific mutagenesis without phenotypic selection. Proc Natl Acad. Sci. USA. 82, 488-492).

[0434] When an amino acid residue is altered, the amino acid is preferably mutated into a different amino acid(s) that conserves the properties of the amino acid side-chain. Examples of amino-acid side chain properties are: hydrophobic amino acids (A, I, L, M, F, P, W, Y, and V), hydrophilic amino acids (R, D, N, C, E, Q, G, H, K, S, and T), amino acids containing aliphatic side chains (G, A, V, L, I, and P), amino acids containing hydroxyl group-containing side chains (S, T, and Y), amino acids containing sulfur atom-containing side chains (C and M), amino acids containing carboxylic acid- and amide-containing side chains (D, N, E, and Q), amino acids containing basic side chains (R, K, and H), and amino acids containing aromatic side chains (H, F, Y, and W) (amino acids are represented by one-letter codes in parentheses) Amino acid substitutions within each of these groups are called conservative substitutions. It is already known that a polypeptide containing a modified amino acid sequence in which one or more amino acid residues in a given amino acid sequence are deleted, added, and/or substituted with other amino acids can retain the original biological activity (Mark, D. F. et al., Proc. Natl. Acad. Sci. USA; (1984) 81: 5662-6; Zoller, M. J. and Smith, M., Nucleic Acids Res. (1982) 10: 6487-500; Wang, A. et al., Science (1984) 224: 1431-3; Dalbadie-McFarland, G. et al., Proc. Natl. Acad. Sci. USA (1982) 79: 6409-13). Variable regions of the present invention containing such amino acid modifications have an amino acid sequence identity of at least 70%, more preferably at least 75%, even more preferably at least 80%, still more preferably at least 85%, yet more preferably at least 90%, and most preferably at least 95%, with the amino acid sequence of the CDR sequences, FR sequences, or whole variable regions of the variable region prior to modification. Herein, sequence identity is defined as the percentage of residues identical to those in the original amino acid sequence of the H-chain variable region or L-chain variable region determined after the sequences are aligned, and gaps are appropriately introduced to maximize the sequence identity as necessary. The identity of amino acid sequences can be determined by the method described below.

[0435] Furthermore, a “functionally equivalent antibody variable region” can be obtained, for example, from nucleic acids that hybridize under stringent conditions with nucleic acids comprising a nucleotide sequence encoding the amino acid sequence of a variable region in Tables 1 to 3 mentioned above. Stringent hybridization conditions for isolating a nucleic acid that hybridizes under stringent conditions with a nucleic acid comprising a nucleotide sequence encoding the amino acid sequence of a variable region include, for example, the conditions of 6 M urea, 0.4% SDS, 0.5×SSC, and 37° C., or hybridization conditions with a stringency equivalent thereto. Isolation of nucleic acids with a much higher homology can be expected with more stringent conditions, for example, the conditions of 6 M urea, 0.4% SDS, 0.1×SSC, and 42° C. The washing conditions following the hybridization are, for example, washing using 0.5×SSC (1×SSC is 0.15 M NaCl and 0.015 M sodium citrate at pH7.0) and 0.1% SDS at 60° C., more preferably washing using 0.2×SSC and 0.1% SDS at 60° C., even more preferably washing using 0.2×SSC and 0.1% SDS at 62° C., yet even more preferably washing using 0.2×SSC and 0.1% SDS at 65° C., and still more preferably washing using 0.1×SSC and 0.1% SDS at 65° C. The sequences of the isolated nucleic acids can be determined by the known methods described below. The overall nucleotide sequence homology of the isolated nucleic acid is at least 50% or higher, preferably 70% or higher, and more preferably 90% or higher (for example, 95%, 96%, 97%, 98%, 99%, or higher) sequence identity.

[0436] Nucleic acids that hybridize under stringent conditions to a nucleic acid comprising a nucleotide sequence encoding the amino acid sequence of a variable region can also be isolated by using, instead of the above-described methods using hybridization techniques, gene amplification methods such as polymerase chain reaction (PCR) that uses primers synthesized based on information of the nucleotide sequence encoding the variable-region amino acid sequence.

[0437] The identity of one nucleotide sequence or amino acid sequence to another can be determined using the algorithm BLAST, by Karlin and Altschul (Proc. Natl. Acad. Sci. USA (1993) 90: 5873-7). Programs called BLASTN and BLASTX were developed based on this algorithm (Altschul et al., J. Mol. Biol. (1990) 215: 403-10). To analyze nucleotide sequences according to BLASTN based on BLAST, the parameters are set, for example, as score=100 and wordlength=12. On the other hand, parameters used for the analysis of amino acid sequences by BLASTX based on BLAST include, for example, score=50 and wordlength=3. Default parameters for each program are used when using the BLAST and Gapped BLAST programs. Specific techniques for such analyses are known in the art (see the website of the National Center for Biotechnology Information (NCBI), Basic Local Alignment Search Tool (BLAST); http://www.ncbi.nlm.nih.gov).

### Pharmaceutical Compositions Comprising an Anti-T Cell Antigen-Binding Molecule

[0438] From another viewpoint, the present disclosure provides pharmaceutical compositions comprising as the active ingredient an anti-T cell antigen-binding molecule, preferably a bispecific antibody that comprises: (1) a domain comprising an antibody variable region having glypican 3-binding activity, (2) a domain comprising an antibody variable region having T-cell receptor complex-binding activity, and (3) a domain comprising an Fc region with reduced binding activity towards an Fcγ receptor. Furthermore, the present disclosure relates to pharmaceutical compositions that induce cell injury, which comprise the anti-T cell antigen-binding molecule as an active ingredient. Pharmaceutical compositions of the present disclosure which induce the described cell injury, particularly T-cell-dependent cellular cytotoxicity, are preferably administered to an individual suffering from a disease for which the activities are needed for prevention or treatment, or an individual in which the disease is possible to relapse.

[0439] As specifically described above, human glypican 3 (GPC3) is a cancer antigen specifically expressed in cancer cells. Therefore, pharmaceutical compositions comprising as the active ingredient an anti-T cell antigen-binding molecule composed of a domain comprising an antibody variable region having glypican 3-binding activity are preferably administered to an individual suffering from cancer or an individual in which the cancer may relapse with the aim of either or both of treatment and prevention of the cancer. More specifically, the present disclosure provides pharmaceutical compositions comprising as the active ingredient a bispecific antibody that comprises (1) a domain comprising an antibody variable region having glypican 3-binding activity, (2) a domain comprising an antibody variable region having T-cell receptor complex-binding activity, and (3) a domain comprising an Fc region with reduced binding activity towards an Fcγ receptor; wherein the pharmaceutical compositions are for administration with a VEGF inhibitor, and are for either or both of the treatment and prevention of cancer; and wherein the pharmaceutical compositions are for the purpose of any one or a combination selected from preventing, alleviating, and treating either of both of CRS and cytokine release resulting from administration of the pharmaceutical compositions.

[0440] Furthermore, the present disclosure relates to production of pharmaceutical compositions of a bispecific antibody that comprises (1) a domain comprising an antibody variable region having glypican 3-binding activity, (2) a domain comprising an antibody variable region having T-cell receptor complex-binding activity, and (3) a domain comprising an Fc region with reduced binding activity towards an Fcγ receptor, wherein the compositions are administered with a VEGF inhibitor, and are for either or both of the treatment and prevention of cancer, and wherein the pharmaceutical compositions are for the purpose of any one or a combination selected from preventing, alleviating, and treating either or both of CRS and cytokine release resulting from administration of the pharmaceutical compositions.

[0441] Alternatively, the present disclosure relates to methods for either or both of treating and preventing cancer by administering, with a VEGF inhibitor, a bispecific antibody that comprises (1) a domain comprising an antibody variable region having glypican 3-binding activity, (2) a domain comprising an antibody variable region having T-cell receptor complex-binding activity, and (3) a domain comprising an Fc region with reduced binding activity towards an Fcγ receptor, wherein the methods are for the purpose of any one or a combination selected from preventing, alleviating, and treating either or both of CRS and cytokine release resulting from administration of the pharmaceutical compositions.

[0442] Furthermore, the present disclosure provides uses of a bispecific antibody, administered with a VEGF inhibitor, which comprises (1) a domain comprising an antibody variable region having glypican 3-binding activity, (2) a domain comprising an antibody variable region having T-cell receptor complex-binding activity, and (3) a domain comprising an Fc region with reduced binding activity towards an Fcγ receptor in either or both of the treatment and prevention of cancer, wherein the VEGF inhibitor is used for the purpose of any one or a combination selected from preventing, alleviating, and treating either or both of CRS and cytokine release resulting from administration of the bispecific antibody.

[0443] Accordingly, in a preferred embodiment of the present disclosure, a step of identifying a subject suffering from a GPC3-expressing cancer can be included before administering the pharmaceutical composition. Techniques for sampling cancer tissues from living bodies, identifying cancer cells included in the sampled tissues, and determining their levels of GPC3 expression are well known. If necessary, the level of GPC expression in the cells used as the sample may be compared to the level of GPC3 expression in a normal tissue, and when the level is higher, the GPC3 expression level can be judged to be high. Preferred normal tissues for comparing the expression level are normal cells from the same tissues (organs) as the tissues (organs) from which the cancer cells derive.

[0444] More specifically, in certain embodiments of the present disclosure, provided are methods for either or both of treating and preventing cancer, which comprise identifying a subject suffering from cancer with high GPC3 expression level, and administering to the identified subject, together with a VEGF inhibitor, a bispecific antibody which comprises (1) a domain comprising an antibody variable region having glypican 3-binding activity, (2) a domain comprising an antibody variable region having T-cell receptor complex-binding activity, and (3) a domain comprising an Fc region with reduced binding activity towards an Fcγ receptor, wherein the methods are for the purpose of any one or a combination selected from preventing, alleviating, and treating either or both of CRS and cytokine release caused by administration of the bispecific antibody.

[0445] Furthermore, in the present disclosure, cytotoxicity-inducing agents and cell growth-inhibiting agents comprising as the active ingredient a multispecific antigen-binding molecule that comprises:
[0446] (1) a domain comprising an antibody variable region having glypican 3-binding activity,
[0447] (2) a domain comprising an antibody variable region having T-cell receptor complex-binding activity, and
[0448] (3) a domain comprising an Fc region with reduced binding activity towards an Fcγ receptor can be expressed as a method for inducing cell injury which comprises the step of administering the anti-T cell antigen-binding molecule to an individual, or it can be expressed as a use of the anti-T cell antigen-binding molecule in the manufacture of a cytotoxicity-inducing agent and a cell growth-inhibiting agent.

[0449] In the present disclosure “comprising as the active ingredient a multispecific antigen-binding molecule that comprises (1) a domain comprising an antibody variable region having glypican 3-binding activity, (2) a domain comprising an antibody variable region having T-cell receptor complex-binding activity, and (3) a domain comprising an Fc region with reduced binding activity towards an Fcγ receptor” means comprising the anti-T cell antigen-binding molecule as a major active component, without limitation to the content ratio of the anti-T cell antigen-binding molecule.

[0450] If necessary, anti-T cell antigen-binding molecules, preferably bispecific antibodies of the present invention may be encapsulated in microcapsules (e.g., those made of hydroxymethylcellulose, gelatin, and poly(methylmetacrylate)), or incorporated as components of a colloidal drug delivery system (e.g., liposomes, albumin microspheres, microemulsion, nanoparticles, and nanocapsules) (see, for example, “Remington's Pharmaceutical Science 16th edition”, Oslo Ed. (1980)). Methods for preparing the pharmaceutical agents as controlled-release pharmaceutical agents are also well known, and such methods may be applied to the anti-T cell antigen-binding molecules of the present invention (J. Biomed. Mater. Res. (1981) 15: 267-277; Chemtech. (1982) 12: 98-105; U.S. Pat. No. 3,773,719; European Patent Application Publication Nos. EP 58,481 and EP 133,988; Biopolymers (1983) 22: 547-556).

[0451] The pharmaceutical compositions comprising the anti-T cell antigen-binding molecule of the present disclosure may be administered to patients by oral or parenteral administration, and parenteral administration is preferred. Specific examples of the administration method include administration by injection, transnasal administration, transpulmonary administration, and transdermal administration. Examples of administration by injection include intravenous injection, intramuscular injection, intraperitoneal injection, and subcutaneous injection. A pharmaceutical composition of the present invention or a cytotoxicity-inducing agent and a cell growth-inhibiting agent can be administered systemically or locally, for example, through administration by injection. The method of administration can be selected appropriately according to the age and symptoms of the patient. The dose can be selected from the range of 0.0001 mg to 1000 mg per kilogram body weight for a single administration. Alternatively, for example, the dose may be selected from the range of 0.001 mg/body to 100000 mg/body per patient. However, the pharmaceutical compositions of the present invention or a cytotoxicity-inducing agent and cell growth-inhibiting agent are not limited to these doses.

[0452] The pharmaceutical compositions comprising the anti-T cell antigen-binding molecule of the present disclosure can be formulated according to conventional methods (for example, Remington's Pharmaceutical Science, latest edition, Mark Publishing Company, Easton, U.S.A), and may also contain pharmaceutically acceptable carriers and additives. Examples include, but are not limited to surfactants, excipients, coloring agents, perfumes, preservatives, stabilizers, buffers, suspending agents, isotonization agents, binders, disintegrants, lubricants, fluidity promoting agents, and flavoring agents; and other commonly used carriers can be suitably used. Specific examples of the carriers include light anhydrous silicic acid, lactose, crystalline cellulose, mannitol, starch, carmellose calcium, carmellose sodium, hydroxypropyl cellulose, hydroxypropyl methyl cellulose, polyvinylacetal diethylaminoacetate, polyvinylpyrrolidone, gelatin, medium chain fatty acid triglyceride, polyoxyethylene hardened castor oil 60, saccharose, carboxymethyl cellulose, corn starch, inorganic salt, and such.

[0453] In one embodiment, the present disclosure relates to pharmaceutical compositions for use in a combination therapy with a VEGF inhibitor, which comprise an anti-T cell antigen-binding molecule, for example, a bispecific antibody, preferably a bispecific antibody that binds to a cancer antigen and CD3, wherein the pharmaceutical compositions are for the purpose of any one or a combination selected from preventing, alleviating, and treating either or both of CRS and cytokine release caused by administration of the bispecific antibody. In one embodiment, the VEGF inhibitor can be selected, for example, from the group consisting of an anti-VEGF antigen-binding molecule, an anti-VEGFR1 antigen-binding molecule, an anti-VEGFR2 antigen-binding molecule, a fusion protein comprising a VEGF receptor or a fragment thereof, and a tyrosine kinase inhibitor. In particular, antibodies that bind to VEGF, VEGFR1, or VEGFR2 are preferred VEGF inhibitors. Specifically, Bevacizumab is a humanized anti-VEGF antibody; alternatively, Ramucirumab is a human anti-VEGFR2 antibody. In addition, molecular target drugs, such as Aflibercept, that were developed using VEGF as the target are also preferred examples of a VEGF inhibitor. Details of the combination therapy are disclosed in “V. Combination therapies” herein.

### III. VEGF Inhibitors

[0454] In one embodiment, a “VEGF inhibitor” or “VEGF antagonist” refers to a substance capable of inhibiting or inactivating VEGF, or reducing the expression level or activity level of VEGF. A VEGF inhibitor is, for example, a compound that binds to VEGF and partially or completely blocks its activity, reduces, prevents, delays activation of, inactivates, or desensitizes it, or down-regulates its activity or expression, such as an antagonist. In another example, a VEGF inhibitor is a compound that binds to VEGF receptors or inhibit the binding of VEGF to receptors to partially or completely block the activity of VEGF, reduce, prevent, delay the activation of, inactivate, or desensitize VEGF, or down-regulate the activity. VEGF inhibitors include polypeptide inhibitors such as antigen-binding molecules, antibodies, antibody derivatives, antibody fragments, and soluble receptors, and their derivatives; nucleic acid inhibitors such as siRNAs or antisense RNAs, and their derivatives; genetically modified forms of soluble factors such as forms having altered activity; as well as naturally occurring and synthetic soluble factor antagonists; and small molecule compounds, but are not limited thereto.

[0455] In one embodiment, a VEGF inhibitor is one or more VEGF inhibitors selected from an anti-VEGF antigen-binding molecule, an anti-VEGFR1 antigen-binding molecule, an anti-VEGFR2 antigen-binding molecule, a fusion protein comprising a VEGF receptor or a fragment thereof, and a tyrosine kinase inhibitor. In one embodiment the VEGF inhibitor is an antibody, an antibody derivative, or an antibody fragment that binds to one or more signaling factors selected from an anti-VEGF antigen-binding molecule, an anti-VEGFR1 antigen-binding molecule, an anti-VEGFR2 antigen-binding molecule, a fusion protein comprising a VEGF receptor or a fragment thereof, and a tyrosine kinase inhibitor, or to the receptors thereof.

### VEGF Signaling Inhibitors

[0456] In one embodiment, a VEGF inhibitor is an inhibitor of VEGF signaling, such as an inhibitor of VEGF or VEGF receptor. In one embodiment, an inhibitor may be an anti-VEGF antigen-binding molecule, an anti-VEGF antibody (including a chimeric, humanized, or human anti-VEGF antibody), or an antigen-binding fragment thereof or an antibody derivative thereof. In another embodiment, an inhibitor may be an anti-VEGF receptor (VEGFR) antigen-binding molecule, an anti-VEGFR antibody (including a chimeric, humanized, or human anti-VEGFR antibody), or an antigen-binding fragment thereof or an antibody derivative thereof. In one embodiment, these inhibitors may be a soluble VEGF receptor or a fragment thereof that can block VEGF signaling. In a further embodiment, the VEGF receptor or a fragment thereof may be a fusion protein fused with a heterologous domain such as an Fc domain, for example, a VEGFR-Fc fusion protein.

[0457] In one embodiment, an anti-VEGF antibody includes, for example, Bevacizumab and Ranibizumab. In another embodiment, an anti-VEGF receptor antibody includes, for example, Ramucirumab. In one embodiment, an inhibitor of VEGF signaling includes recombinant fusion proteins such as Aflibercept.

### Bevacizumab

[0458] Bevacizumab is a humanized anti-VEGF antibody. Bevacizumab is an antibody indicated with the Japanese Accepted Names for Pharmaceuticals (JAN) of Bevacizumab, the CAS Registry No. of 216974-75-3, or the INN Name of Bevacizumab. Bevacizumab is also a recombinant humanized monoclonal antibody, which is composed of complementarity-determining regions of a mouse anti-human vascular endothelial growth factor (VEGF) monoclonal antibody, human framework regions, and human IgG1 constant regions. Bevacizumab is produced in Chinese hamster ovary cells. Bevacizumab is a glycoprotein (molecular weight: approximately 149,000) composed of two H chains (γ1 chains) consisting of 453 amino acid residues and two L chains (κ chains) consisting of 214 amino acid residues. “Bevacizumab” also includes biosimilar Bevacizumabs.

### Pharmaceutical Compositions Comprising a VEGF Inhibitor

[0459] From another viewpoint, the present disclosure provides pharmaceutical compositions comprising as an active ingredient a VEGF inhibitor, preferably an antibody against VEGF or its receptors, and more preferably Bevacizumab or Ramucirumab. On another hand, the present disclosure provides pharmaceutical compositions comprising as an active ingredient a fusion protein comprising the extracellular domain of a VEGF receptor, or preferably Aflibercept. Furthermore, the present disclosure relates to pharmaceutical compositions comprising the VEGF inhibitor as the active ingredient, which are for the purpose of any one of, or a combination selected from, preventing, alleviating, and treating symptoms of either, or both, of cytokine release syndrome (CRS) and cytokine release. The pharmaceutical compositions of the present disclosure are preferably administered to an individual who may develop CRS or cytokine release, and/or an individual who has developed CRS or signs of CRS and needs treatment. In certain embodiments of the present disclosure, the mechanism that brought about (or will bring about) CRS or cytokine release in subjects may be any mechanism. That is, regardless of the cause, the VEGF inhibitor can be administered to subjects observed to have CRS or show cytokine release or anticipated to develop CRS or cytokine release. For example, if administration of a given pharmaceutical agent may bring about CRS or cytokine release, subjects administered (or who will be administered) with that pharmaceutical agent can be selected, and the VEGF inhibitor can be administered to them. For example, a subject in whom CRS or cytokine release resulting from administration of a given pharmaceutical agent has been observed in the past may develop CRS or cytokine release if the same pharmaceutical agent is administered again.

[0460] In certain embodiments of the present disclosure, there is provided a step of selecting, from subjects in whom CRS or cytokine release has been observed in the past due to administration of a given pharmaceutical agent, a subject who is to be administered or who has been administered with the same pharmaceutical agent, and a VEGF inhibitor for administration along with the pharmaceutical agent to the subject. Alternatively, the present disclosure provides, so as to administer to a subject in whom CRS or cytokine release has been observed in the past due to administration of a given pharmaceutical agent the same pharmaceutical agent, a use of a VEGF inhibitor for administration to the subject along with the pharmaceutical agent. Furthermore, the present disclosure provides a method comprising selecting, from subjects in whom CRS or cytokine release has been observed in the past due to administration of a given pharmaceutical agent, a subject who will be administered with the same pharmaceutical agent, and administering a VEGF inhibitor together with the pharmaceutical agent to the subject, which is a method for the purpose of any one or a combination selected from preventing, alleviating, and treating at least one symptom selected from CRS and cytokine release resulting from administration of the same pharmaceutical agent. According to the present disclosure, an example of a treatment that may bring about CRS or cytokine release in a subject includes administration to the subject of an anti-T cell antigen-binding molecule, such as a bispecific antibody, or preferably a bispecific antibody that binds to a cancer antigen and CD3.

[0461] Without being limited to the following, a mechanism that enables a use of a pharmaceutical composition comprising as the active ingredient a VEGF inhibitor of the present disclosure for the purpose of any one or a combination selected from preventing, alleviating, and treating either, or both, of CRS and cytokine release, is a mechanism that can suppress IL-6 release by inhibiting VEGF signaling. Without being limited to the following, another mechanism that enables a use of a pharmaceutical composition comprising as the active ingredient a VEGF inhibitor of the present disclosure for the purpose of any one or a combination selected from preventing, alleviating, and treating CRS, is a mechanism in which vascular permeability is suppressed by the VEGF inhibitor and permeation of cytokines from the blood vessels into tissues can be suppressed.

[0462] Therefore, in the present disclosure, pharmaceutical compositions comprising as the active ingredient a VEGF inhibitor may also be expressed as a method for the purpose of any one, or a combination, selected from preventing, alleviating, and treating either or both of CRS and cytokine release associated with administration of an anti-T cell antigen-binding molecule, wherein the method comprises administering the VEGF inhibitor to an individual; or it can be expressed as a use of the VEGF inhibitor in the manufacture of a pharmaceutical for the purpose of any one, or a combination, selected from preventing, alleviating, and treating either or both of CRS and cytokine release associated with administration of an anti-T cell antigen-binding molecule.

[0463] In the present disclosure, “comprising a VEGF inhibitor as an active ingredient” means that the VEGF inhibitor is comprised as a major active ingredient, without limitation of the content ratio of the VEGF inhibitor.

[0464] If necessary, VEGF inhibitors of the present invention may be encapsulated in microcapsules (e.g., those made of hydroxymethylcellulose, gelatin, and poly(methylmetacrylate)), or incorporated as components of a colloidal drug delivery system (e.g., liposomes, albumin microspheres, microemulsion, nanoparticles, and nanocapsules) (see, for example, “Remington's Pharmaceutical Science 16th edition”, Oslo Ed. (1980)). Methods for preparing the pharmaceutical agents as controlled-release pharmaceutical agents are also well known, and such methods may be applied to the VEGF inhibitors of the present invention (J. Biomed. Mater. Res. (1981) 15: 267-277; Chemtech. (1982) 12: 98-105; U.S. Pat. No. 3,773,719; European Patent Application Publication Nos. EP 58,481 and EP 133,988; Biopolymers (1983) 22: 547-556).

[0465] The pharmaceutical compositions comprising the VEGF inhibitor of the present disclosure may be administered to patients by oral or parenteral administration, and parenteral administration is preferred. Specific examples of the administration method include administration by injection, transnasal administration, transpulmonary administration, and transdermal administration. Examples of administration by injection include intravenous injection, intramuscular injection, intraperitoneal injection, and subcutaneous injection. A pharmaceutical composition of the present invention or a cytotoxicity-inducing agent and a cell growth-inhibiting agent can be administered systemically or locally, for example, through administration by injection. The method of administration can be selected appropriately according to the age and symptoms of the patient. The dose can be selected from the range of 0.0001 mg to 1000 mg per kilogram body weight for a single administration. Alternatively, for example, the dose may be selected from the range of 0.001 mg/body to 100000 mg/body per patient. However, the pharmaceutical compositions of the present invention are not limited to these doses.

[0466] In one embodiment, when the VEGF inhibitor is Bevacizumab, the active ingredient is administered at approximately 5 to 15 mg/kg per dose, such as a dose selected from the doses of 5 mg/kg or less, 7.5 mg/kg or less, 10 mg/kg or less, and 15 mg/kg or less per dose for a patient weighing 30 kg or more, for example by intravenous injection over a course of 0.5 hours, 1 hour, 2 hours, or 3 hours. In one embodiment, when the VEGF inhibitor is Ramucirumab, the active ingredient is administered at approximately 4 to 15 mg/kg per dose, such as 8 mg/kg or less and 10 mg/kg or less per dose for a patient weighing 30 kg or more, for example by intravenous injection over a course of 0.5 hours, 1 hour, 2 hours, or 3 hours. In a different embodiment, when Bevacizumab or Ramucirumab is administered for purposes of treating CRS, and the symptoms of CRS are not improved after the first administration of Bevacizumab or Ramucirumab to a patient, administrations of Bevacizumab or Ramucirumab can be added up to three times. In one example, when Bevacizumab or Ramucirumab is sequentially administered in this manner, the interval must be 8 hours or more from the previous administration.

[0467] The pharmaceutical compositions comprising the VEGF inhibitor of the present disclosure can be formulated according to conventional methods (for example, Remington's Pharmaceutical Science, latest edition, Mark Publishing Company, Easton, U.S.A), and may also contain pharmaceutically acceptable carriers and additives. Examples include, but are not limited to surfactants, excipients, coloring agents, perfumes, preservatives, stabilizers, buffers, suspending agents, isotonization agents, binders, disintegrants, lubricants, fluidity promoting agents, and flavoring agents; and other commonly used carriers can be suitably used. Specific examples of the carriers include light anhydrous silicic acid, lactose, crystalline cellulose, mannitol, starch, carmellose calcium, carmellose sodium, hydroxypropyl cellulose, hydroxypropyl methyl cellulose, polyvinylacetal diethylaminoacetate, polyvinylpyrrolidone, gelatin, medium chain fatty acid triglyceride, polyoxyethylene hardened castor oil 60, saccharose, carboxymethyl cellulose, corn starch, inorganic salt, and such.

[0468] In one embodiment, the present disclosure relates to pharmaceutical compositions comprising a VEGF inhibitor, preferably a VEGF inhibitor, more preferably an antibody against VEGF or its receptor, and most preferably Bevacizumab or Ramucirumab, wherein the pharmaceutical composition is for use in its combination therapy with an anti-T cell antigen binding molecule. Further, the present disclosure relates to pharmaceutical compositions comprising as an active ingredient a VEGF inhibitor consisting of a fusion protein comprising the ligand-binding site of the VEGF receptor, preferably Aflibercept, wherein the pharmaceutical composition is for use in its combination therapy with an anti-T cell antigen binding molecule. In one embodiment, the anti-T cell antigen-binding molecule is for example, a bispecific antibody, or preferably a bispecific antibody that binds to a cancer antigen and CD3. Details of the combination therapy are disclosed in “V. Combination therapies” herein.

### IV. Cytokine Release Syndrome (CRS)

[0469] In one embodiment, cytokine release syndrome (CRS) is a serious and potentially life-threatening side effect that can occur when a pharmaceutical agent, for example, an antibody pharmaceutical (such as, an anti-T cell antibody) or a T cell pharmaceutical (such as, a chimeric antigen receptor (CAR) T cell (CAR-T cell)) is administered. Administration of antibody pharmaceuticals or T cell pharmaceuticals activates the immune response in the body more than necessary and releases inflammatory cytokines and such, which result in various symptoms such as chills, nausea, malaise, headache, fever, tachycardia, and blood pressure fluctuations. Severe cases, in particular, are sometimes referred to as cytokine storms. CRS results from high levels of immune activation when large numbers of lymphocytes and/or myeloid cells release inflammatory cytokines upon activation. The severity of CRS and the timing of onset of symptoms may vary depending on the magnitude of immune cell activation, the type of pharmaceutical agent administered, and/or the amount of systemic tumor tissue in the individual. In the case of T cell therapy for cancer, symptom onset is typically days to weeks after administration of the T cell therapy, for example, when there is a peak of T cell proliferation in vivo. See, for example, Lee et al. Blood. 124.2 (2014): 188-95.

[0470] In one embodiment, the symptoms of CRS may include neurologic toxicity, disseminated intravascular coagulation, cardiac dysfunction, adult respiratory distress syndrome, renal failure, and/or hepatic failure. For example, the symptoms of CRS may include fever/high fever with or without chills, fatigue, discomfort, muscle pain, vomiting, headache, nausea, loss of appetite, joint pain, diarrhea, rash, hypoxia, tachypnea, hypotension, widened pulse pressure, potentially diminished cardiac output (late), increased cardiac output (early), azotemia, hypofibrinogenemia with or without bleeding, elevated D-dimer, hyperbilirubinemia, transaminitis, confusion, delirium, changes in mental status, hallucinations, tremor (trembling), seizures, altered gait, word finding difficulty, obvious aphasia, or dementia.

[0471] In one embodiment, CRS is characterized by increased concentrations of several cytokines in an individual. In one embodiment, the cytokines include IL-1β, IL-2, IL-4, IL-5, IL-6, IL-8, IL-10, IL-12, IL-13, IL-15, IL-17, IL-1Ra, IL-2R, IFN-α, IFN-γ, MIP-1a, MIP-1(3, MCP-1, TNFα, GM-CSF, G-CSF, CXCL9, CXCL10, CXCR factor, VEGF, RANTES, eotaxin, EGF, HGF, FGF-β, CD30, CD30L, CD40, CD40L, ferritin, and RAGE, but are not limited thereto. Preferably, the cytokine comprises IL-6, IL-1 beta, or TNF-alpha, or any combination thereof. Most preferably, the cytokine is IL-6. In one embodiment, patients with large tumor volumes have a higher incidence and severity of cytokine syndrome.

[0472] In one embodiment, those skilled in the art will understand that the term “cytokine concentration” includes a measured concentration value, magnitude of fold change, magnitude of percent (%) change, or magnitude of rate change. In addition, methods for measuring cytokines in blood, saliva, serum, urine, plasma, and/or serum are well known in the art.

### Severity (Grade) of CRS

[0473] In one embodiment, CRS can be classified by severity (Grade) from 1 to 5. In one embodiment, for Grade 1 CRS, only symptomatic treatment is needed (for example, nausea, fever, fatigue, muscle pain, malaise, and headache), and the symptoms are not life threatening. For Grade 2 CRS, the symptoms require moderate intervention and generally respond to moderate intervention. Individuals with Grade 2 CRS develop hypotension that is responsive to either fluids or one type of low-dose vasopressor; or they develop grade 2 organ toxicity or mild respiratory symptoms that are responsive to low flow oxygen (less than 40% oxygen). In individuals with Grade 3 CRS, hypotension generally cannot be reversed by fluid therapy or one type of low-dose vasopressor. These individuals generally require lower flow of oxygen and have grade 3 organ toxicity (for example, renal or cardiac dysfunction or blood coagulation disorder) and/or grade 4 transaminitis. Individuals with Grade 3 CRS require more aggressive intervention, such as oxygen of 40% or higher, a high-dose vasopressor, and/or multiple vasopressors. Individuals with Grade 4 CRS suffer from immediately life-threatening symptoms, including grade 4 organ toxicity or a need for mechanical artificial ventilation. Individuals with Grade 4 CRS generally do not have transaminitis. In individuals with Grade 5 CRS, the toxicity causes death.

[0474] In one embodiment, the CRS grading is based on the Common Terminology Criteria for Adverse Events (CTCAE) v4.03 shown in Table 6, the Common Terminology Criteria for Adverse Events (CTCAE) v5.0 shown in Table 7, Lee's criteria of 2014 (Lee D W, et al. Current concepts in the diagnosis and management of cytokine release syndrome. Blood, 124 (2014), pp. 188-195) shown in Table 8, the 2019 ASTCT CRS Consensus Grading (Lee D W, et al. ASTCT Consensus Grading for Cytokine Release Syndrome and Neurologic Toxicity Associated with Immune Effector Cells. Biol Blood Marrow Transplant. 2019 April; 25(4):625-638) shown in Table 9, Penn's criteria, MSKCC's criteria, or CARTOX's criteria (Biol Blood Marrow Transplant. 2019 April; 25(4):625-638 indicated above). Preferably, CRS grading is based on CTCAE v4.03, CTCAE v5.0, or Lee's criteria of 2014. Unless otherwise specified, CRS as used herein refers to CRS according to the criteria in Table 8 (Lee's criteria of 2014).

TABLE 6
(CTCAE v 4.03)

| | |
|---|---|
| Grade I | Mild reaction; not requiring interruption of infusion; not requiring treatment |
| Grade II | Requiring interruption of treatment or infusion. However, responding quickly |
| | to symptomatic treatment (for example: antihistamines, NSAIDs, narcotic |
| | pharmaceutical agents, and intravenous infusion); requiring prophylactic |
| | medications in 24 hours or less |
| Grade III | Prolonged (for example: not rapidly responsive to symptomatic treatment |
| | and/or brief interruption of infusion); recurrence after initial improvement; |
| | requiring hospitalization due to sequela(e) (for example: renal dysfunction, |
| | and pulmonary infiltration) |
| Grade IV | Life-threatening; requiring positive-pressure breathing or mechanical ventilation |
| Grade V | Death |

TABLE 7
(CTCAE v 5.0)

| | |
|---|---|
| Grade I | Fever with or without constitutional symptoms |
| Grade II | Hypotension responding to infusion; hypoxia responding to <40% |
| | oxygen administration |
| Grade III | Hypotension manageable by a single vasopressor; hypoxia requiring ≥40% |
| | oxygen administration |
| Grade IV | Life-threatening; requiring emergency treatment |
| Grade V | Death |

TABLE 8
(Lee's criteria)

| | |
|---|---|
| Grade I | Not life-threatening; requiring symptomatic treatments only (fever, nausea, |
| | fatigue, headache, muscle pain, discomfort) |
| Grade II | Requiring moderate intervention; hypoxia responding to >40% oxygen |
| | administration; hypotension responding to intravenous infusion or low-dose |
| | of a single vasopressor; grade 2 or higher organ toxicity |
| Grade III | Requiring aggressive intervention; hypoxia responding to ≤40% oxygen |
| | administration; hypotension responding to high-dose or multiple |
| | vasopressors; grade 3 or higher organ toxicity or grade 4 or higher |
| | transaminitis |
| Grade IV | Life-threatening; requiring mechanical artificial ventilation; grade 4 or |
| | higher organ toxicity (except transaminitis) |
| Grade V | Death |

TABLE 9
(ASTCT CRS Consensus Grading)

| | Fever | | Hypotension and/or hypoxia |
|---|---|---|---|
| Grade I | 38° C. or higher | and | Hypotension: none, hypoxia: none |
| Grade II | 38° C. or higher | and | Hypotension not requiring a vasopressor and/or |
| | | | hypoxia requiring a low-flow nasal cannula or blow-by |
| Grade III | 38° C. or higher | and | Hypotension requiring a single vasopressor |
| | | | (regardless of combined use of vasopressin), and/or |
| | | | hypoxia requiring high-flow nasal cannula, face mask, |
| | | | nonrebreathing mask, or Venturi mask |
| Grade IV | 38° C. or higher | and | Hypotension requiring multiple vasopressors |
| | | | (excluding vasopressin), and/or hypoxia requiring |
| | | | positive pressure (for example, CPAP, BiPAP, |
| | | | intubation, and mechanical artificial ventilation) |

[0475] In one embodiment, the symptoms of CRS develop within minutes, hours, or days after starting to administer the pharmaceutical agent, but some symptoms are delayed. Preferably, the symptoms of CRS develop within about 96 hours, about 72 hours, or about 48 hours after starting to administer the anti-T cell antigen-binding molecule, and more preferably, the symptoms develop from the day of administration of the anti-T cell antigen-binding molecule to the next day. In another embodiment, the severity of CRS symptoms correlates with peak cytokine concentrations.

### Signs of CRS

[0476] In one embodiment, signs of CRS refer to CRS-like symptoms that are precursors to the above-mentioned CRS (regardless of Grade). Specific examples include, but are not limited to, fever or hypotension that initially develops after administration of the anti-T cell antigen binding molecule.

### Treatment of CRS

[0477] In one embodiment, examples of treatment methods for CRS include VEGF inhibitors, bazedoxifene, SGP130 blockers, vasoactive pharmaceutical agents, systemic adrenal cortex hormones (for example, corticosteroids), immunosuppressants, and mechanical artificial ventilation.

[0478] In one embodiment, the VEGF inhibitor is one or more VEGF inhibitors or antagonistic inhibitors selected from an anti-VEGF antigen-binding molecule, an anti-VEGFR1 antigen-binding molecule, an anti-VEGFR2 antigen-binding molecule, a fusion protein comprising a VEGF receptor or a fragment thereof, and a tyrosine kinase inhibitor. Preferred VEGF inhibitors are disclosed in “III. VEGF inhibitors” herein.

[0479] In one embodiment, when the VEGF inhibitor is Bevacizumab, the active ingredient is administered at approximately 5 to 15 mg/kg per dose, such as a dose selected from the doses of 5 mg/kg or less, 7.5 mg/kg or less, 10 mg/kg or less, and 15 mg/kg or less per dose for a patient weighing 30 kg or more, for example by intravenous injection over a course of 0.5 hours, 1 hour, 2 hours, or 3 hours. In one embodiment, when the VEGF inhibitor is Ramucirumab, the active ingredient is administered at approximately 4 to 15 mg/kg per dose, such as 8 mg/kg or less and 10 mg/kg or less per dose for a patient weighing 30 kg or more, for example by intravenous injection over a course of 0.5 hours, 1 hour, 2 hours, or 3 hours. In a different embodiment, when Bevacizumab (Avastin) or Ranibizumab (Lucentis) is administered for purposes of treating CRS, and the symptoms of CRS are not improved after the first administration, administrations of Bevacizumab (Avastin) or Ranibizumab (Lucentis) can be added up to three times. In one example, when Bevacizumab (Avastin) or Ranibizumab (Lucentis) is sequentially administered in this manner, the interval must be 8 hours or more from the previous administration.

[0480] Exemplary vasoactive pharmaceutical agents include but are not limited to angiotensin-11, endothelin-1, alpha adrenergic agonists, rostanoids, phosphodiesterase inhibitors, endothelin antagonists, circulatory agonists (for example, adrenaline, dobutamine, isoprenaline, and ephedrine), vasopressors (for example, noradrenaline, vasopressin, metaraminol, vasopressin, and methylene blue), inodilators (for example, milrinone and levosimendan), and dopamine

[0481] Exemplary vasopressors include but are not limited to norepinephrine, dopamine, phenylephrine, epinephrine, and vasopressin. In one embodiment, vasopressors include high-dose vasopressors and low-dose vasopressors. In one embodiment, a high-dose vasopressor includes one or more of the following: norepinephrine monotherapy at 20 μg/min or more, dopamine monotherapy at 10 μg/kg/min or more, phenylephrine monotherapy at 200 μg/min or more, and/or epinephrine monotherapy at 10 μg/min or more. In some embodiments, if an individual is on vasopressin, a high-dose vasopressor includes vasopressin+norepinephrine equivalent at 10 μg/min or more (where the dose of norepinephrine equivalent=[norepinephrine (μg/min)]+[dopamine (μg/kg/min)/2]+[epinephrine (μg/min)]+[phenylephrine (μg/min)/10]). In some embodiments, if the individual is on combination vasopressors (not vasopressin), a high-dose vasopressor includes norepinephrine equivalent at 20 μg/min or more (where the dose of norepinephrine equivalent=[norepinephrine (μg/min)]+[dopamine (μg/kg/min)/2]+[epinephrine (μg/min)]+[phenylephrine (μg/min)/10]. See for example, idem.

[0482] In one embodiment, a low-dose vasopressor is a vasopressor administered at a dose less than one or more of the doses listed above for high-dose vasopressors.

[0483] Exemplary corticosteroids include but are not limited to dexamethasone, hydrocortisone, and methylprednisolone. In one embodiment, a dose of 0.5 mg/kg of dexamethasone is used by oral or intravenous administration. In one embodiment, 8 to 20 mg of dexamethasone per dose, a pharmaceutically acceptable salt thereof, or a derivative thereof is used by oral or intravenous administration. It will be understood by those skilled in the art that the dose of dexamethasone is not limited to the above and may be appropriately changed depending on the condition of the individual and the severity of CRS.

[0484] An exemplary immunosuppressant includes a TNF-alpha inhibitor or an IL-1 inhibitor. In one embodiment, TNF-alpha inhibitors include anti-TNF-alpha antibodies, for example, a monoclonal antibody, such as Infliximab. In one embodiment, TNF-alpha inhibitors include soluble TNF-alpha receptors (for example, Etanercept). In embodiments, IL-1 or IL-1R inhibitors include Anakinra.

### V. Combination Therapies

[0485] In one embodiment, the present disclosure relates to a combined use of an arbitrary pharmaceutical agent and a VEGF inhibitor, wherein the pharmaceutical agent is a pharmaceutical agent that is the cause of either or both of CRS and cytokine release in a subject of administration, and wherein the combined use is for the purpose of any one, or a combination, selected from preventing, alleviating, and treating either or both of CRS and cytokine release resulting from administration of the pharmaceutical agent. A combination therapy of the present disclosure can also be defined as follows:

[0486] specifically, a combination therapy using pharmaceutical agent A and pharmaceutical agent B, wherein pharmaceutical agent A has an effect of potentially inducing either or both of CRS and cytokine release following administration to a subject and pharmaceutical agent B is a VEGF inhibitor, and wherein the combination therapy is for the purpose of any one or a combination selected from preventing, alleviating, and treating either or both of CRS and cytokine release induced by administration of pharmaceutical agent A.

[0487] In another embodiment, the present disclosure relates to a pharmaceutical composition which comprises an arbitrary pharmaceutical agent (pharmaceutical agent A) and which is for use in a combination therapy with a VEGF inhibitor (pharmaceutical agent B), wherein the pharmaceutical agent may induce either or both of CRS and cytokine release in a subject of administration, and wherein the pharmaceutical composition is for the purpose of any one or a combination selected from preventing, alleviating, and treating either or both of CRS and cytokine release resulting from administration of the pharmaceutical agent. In a further embodiment, the present disclosure relates to a pharmaceutical composition which comprises a VEGF inhibitor and which is for use in a combination therapy with an arbitrary pharmaceutical agent, wherein the pharmaceutical agent may induce either or both of CRS and cytokine release in a subject of administration, and the pharmaceutical composition is for the purpose of any one or a combination selected from preventing, alleviating, and treating either or both of CRS and cytokine release resulting from administration of the pharmaceutical agent. In the present disclosure, when the pharmaceutical agent which may induce either or both of CRS and cytokine release is an anti-T cell antigen-binding molecule, the present disclosure relates to a method for treating cancer by administration of a VEGF inhibitor, wherein the method is characterized by the purpose of any one or a combination selected from preventing, alleviating, and treating either or both of CRS and cytokine release resulting from the anti-T cell antigen-binding molecule.

[0488] In the present disclosure, a pharmaceutical agent which may induce either or both of CRS and cytokine release in a subject of administration indicates a pharmaceutical agent which may cause either or both of CRS and cytokine release. Specifically, examples include pharmaceutical agents reported to induce either or both of CRS and cytokine release as a side effect accompanying administration. For example, pharmaceutical agents that target lymphocytes are pharmaceutical agents whose stimuli may induce cytokine production. In other words, lymphocyte-stimulating pharmaceutical agents may become a cause of either or both of CRS and cytokine release. Examples of such pharmaceutical agents are pharmaceutical agents comprising as the active ingredient an anti-T cell antigen-binding molecule.

[0489] In one embodiment, administration of a VEGF inhibitor accomplishes the purpose of any one or a combination selected from preventing, alleviating, and treating either or both of CRS and cytokine release in an individual. Therefore, the present disclosure may be rephrased as a method for the purpose of any one or a combination selected from preventing, alleviating, and treating either or both of CRS and cytokine release, which comprises administering a VEGF inhibitor.

[0490] In one embodiment, a VEGF inhibitor is administered subcutaneously or intravenously to an individual before, simultaneously with, or after administration of an arbitrary pharmaceutical agent that will cause either or both of CRS and cytokine release. Preferably, a VEGF inhibitor is administered intravenously to an individual before, simultaneously with, or after administration of the pharmaceutical agent. Although not intended to be limiting, when a VEGF inhibitor is administered before or simultaneously with administration of the pharmaceutical agent, it has the effect of preventing or alleviating development of either or both of CRS and cytokine release associated with administration of the pharmaceutical agent. In one embodiment, a VEGF inhibitor is administered 6 days, 5 days, 4 days, 3 days, 2 days, or 1 day before administration of an arbitrary pharmaceutical agent that causes either or both of CRS and cytokine release, or on the same day as but before administration of the pharmaceutical agent. Alternatively, a VEGF inhibitor may be administered on the same day as and simultaneously with administration of the pharmaceutical agent (in the present disclosure, administration of a VEGF inhibitor before administration of an arbitrary pharmaceutical agent that will cause either or both of CRS and cytokine release, and administration of a VEGF inhibitor simultaneously with administration of the pharmaceutical agent are collectively referred to as “pre-administration of a VEGF inhibitor”). In one embodiment, pre-administration of the VEGF inhibitor prevents or alleviates development of CRS associated with administration of an arbitrary pharmaceutical agent that causes either or both of CRS and cytokine release, without significantly impairing the drug efficacy of the pharmaceutical agent (for example, T cell-dependent cellular cytotoxicity (TDCC) and antitumor effects).

[0491] Furthermore, when a VEGF inhibitor is administered after administration of the arbitrary pharmaceutical agent that causes either or both of CRS and cytokine release and before development of CRS, it has the effect of preventing or alleviating CRS that may develop thereafter. In addition, when a VEGF inhibitor is administered after administration of the pharmaceutical agent and after development of CRS or signs of CRS, it has the effect of treating CRS and alleviating its symptoms.

[0492] Therefore, the present disclosure provides a method for either or both of treating CRS and alleviating its symptoms, which comprises monitoring development of CRS after an arbitrary treatment that causes either or both of CRS and cytokine release, selecting a subject showing signs thereof, and administering a VEGF inhibitor to the subject. Methods for monitoring development of CRS and finding out the signs of CRS are known, as described previously.

[0493] Effects by the VEGF inhibitor for the purpose of any one or a combination selected from preventing, alleviating, and treating either or both of CRS and cytokine release are effects revealed for the first time in the present disclosure. Therefore, the present disclosure provides pharmaceutical compositions comprising a VEGF inhibitor, which are for the purpose of any one or a combination selected from preventing, alleviating, and treating either or both of CRS and cytokine release. Alternatively, the present disclosure provides use of a VEGF inhibitor in the manufacture of pharmaceutical compositions for the purpose of any one or a combination selected from preventing, alleviating, and treating either or both of CRS and cytokine release. Furthermore, the present disclosure provides use of a VEGF inhibitor for the purpose of any one or a combination selected from preventing, alleviating, and treating either or both of CRS and cytokine release. The present disclosure provides a method for the purpose of any one or a combination selected from preventing, alleviating, and treating either or both of CRS and cytokine release, wherein the method comprises selecting any subject selected from subjects who have developed either or both of CRS and cytokine release, subjects showing signs of development thereof, and subjects who will receive treatment that may involve either or both of CRS and cytokine release, and administering a VEGF inhibitor to the subject. In the present disclosure, treatment that may involve either or both of CRS and cytokine release includes, for example, administration of an anti-T cell antigen-binding molecule.

[0494] In one embodiment, the anti-T cell antigen-binding molecule used in the combination therapy is a bispecific antigen-binding molecule comprising “a domain comprising an antibody variable region having T cell receptor complex-binding activity” and “a domain comprising an antibody variable region having cancer antigen-binding activity”, and is preferably a bispecific antibody. In one embodiment, the bispecific antibody may have the structure of a single chain antibody, for example, a structure in which antibody variable regions are linked by linkers. In one embodiment, the anti-T cell antigen-binding molecule further comprises an Fc region with reduced Fcγ receptor-binding activity. Preferably, the anti-T cell antigen-binding molecule is a bispecific antibody comprising (1) a domain comprising an antibody variable region having a glypican 3-binding activity, (2) a domain comprising an antibody variable region having T cell receptor complex-binding activity, and (3) a domain comprising an Fc region with reduced Fcγ receptor-binding activity.

[0495] In one embodiment, a VEGF inhibitor used in the combination therapy is a VEGF inhibitor, preferably an antibody against VEGF or its receptor, and most preferably Bevacizumab or Ramucirumab. In other embodiments, the VEGF inhibitor used in the combination therapy is a fusion protein comprising the ligand binding site of a VEGF receptor, and preferred examples include Aflibercept. In one embodiment, when Bevacizumab or Ramucirumab is administered before or simultaneously with administration of the anti-T cell antigen binding molecule, Bevacizumab or Ramucirumab is administered to human adults and children, for example, at a dose selected from 5 mg/kg to 100 mg/kg, for example, 5 mg/kg to 90 mg/kg, 5 mg/kg to 80 mg/kg, 5 mg/kg to 70 mg/kg, 5 mg/kg to 60 mg/kg, 5 mg/kg to 50 mg/kg, 5 mg/kg to 40 mg/kg, 5 mg/kg to 30 mg/kg, 5 mg/kg to 20 mg/kg, 5 mg/kg to 15 mg/kg, and for example, 10 mg/kg to 100 mg/kg, 20 mg/kg to 100 mg/kg, 30 mg/kg to 100 mg/kg, 40 mg/kg to 100 mg/kg, 50 mg/kg to 100 mg/kg, 60 mg/kg to 100 mg/kg, 70 mg/kg to 100 mg/kg, 80 mg/kg to 100 mg/kg, 90 mg/kg to 100 mg/kg, and the like, per dose. In addition, although it is specified to avoid doubt, for example, when described as 5 mg to 100 mg/kg, any dose included between 5 mg to 100 mg/kg varying by 0.1 mg/kg, such as 5.0 mg/kg, 5.1 mg/kg, 5.2 mg/kg, 5.3 mg/kg, 5.4 mg/kg, 49.9 mg, 50 mg/kg, 50.1 mg/kg, 50.2 mg/kg, . . . 99.8 mg/kg, 99.9 mg/kg, and 100 mg/kg, is intended to be individually and specifically described herein. In one embodiment, Bevacizumab is administered before or simultaneously with administration of the anti-T cell antigen-binding molecule, at 15 mg/kg or less, 0.5 to 15 mg/kg, 1 to 15 mg/kg, 2 to 15 mg/kg, 3 to 15 mg/kg, or 4 to 15 mg/kg per dose for a patient weighing 30 kg or more. In one embodiment, Ramucirumab is administered before or simultaneously with administration of the anti-T cell antigen-binding molecule, at 10 mg/kg or less, 0.5 to 10 mg/kg, 1 to 10 mg/kg, 2 to 10 mg/kg, 3 to 10 mg/kg, or 4 to 10 mg/kg per dose for a patient weighing 30 kg or more.

[0496] In the present disclosure, in several embodiments, in addition to the combined use of an anti-T cell antigen-binding molecule and a VEGF inhibitor, an immune checkpoint inhibitor can be additionally used in combination “Immune checkpoint” refers to a signaling molecule that is expressed on immunocompetent cells (including T cells) and inhibits immune response against the immunocompetent cells by binding to a ligand. The immune checkpoint and its ligand include, but are not limited to, molecules such as PD-1, CTLA-4, TIM3, LAG3, PD-L1, PD-L2, BTNL2, B7-H3, B7-H4, CD48, CD80, 2B4, BTLA, CD160, CD60, CD86, and VISTA. In several embodiments, an “immune checkpoint inhibitor” of the present invention refers to a pharmaceutical agent that inhibits signal transduction mediated by an immune checkpoint by inhibiting binding between an immune checkpoint and its ligand.

[0497] In a non-limiting embodiment of the present disclosure, preferred examples of an immune checkpoint inhibitor include, but are not limited to, PD1 antibodies, PDL1 antibodies, CTLA-4 antibodies, TIM3 antibodies, and LAG3 antibodies. Examples of a PD-1 antibody include Pembrolizumab (CAS Registry No. 1374853-91-4), Nivolumab (CAS Registry No. 946414-94-4), MEDI0680, PDR001, BGB-A317, REGN2810, SHR-1210, PF-06801591, and various known PD1 antibodies. Examples of a PD-L1 antibody include Atezolizumab (CAS Registry No. 1380723-44-3), Avelumab (CAS Registry No. 1537032-82-8), Durvalumab (CAS Registry No. 1428935-60-7), MDX-1105, and various known PD-L1 antibodies. Examples of a CTLA-4 antibody include Ipilimumab (CAS Registry No. 477202-00-9), Tremelimumab (CAS Registry No. 745013-59-6), and various known CTLA-4 antibodies. Examples of a TIM3 antibody include MBG452 and various known TIM3 antibodies. Examples of an LAG3 antibody include BMS-986016, LAG525, and various known LAG3 antibodies.

[0498] In a certain embodiment of the present disclosure, when the combined use of an anti-T cell antigen-binding molecule and a VEGF inhibitor is further additionally combined with the use of an immune checkpoint inhibitor, the immune checkpoint inhibitor can be administered to the subject at any time. Specifically, for example, the immune checkpoint inhibitor can be administered before or after the combined administration of the anti-T cell antigen-binding molecule and VEGF inhibitor. Therefore, for example, after evaluating cancer regression effects caused either by the combined use of the anti-T cell antigen-binding molecule and VEGF inhibitor or by the immune checkpoint inhibitor, the other unevaluated component can be additionally administered. Alternatively, these three agents can be administered simultaneously.

[0499] The combination therapies of the present disclosure may further additionally include administration of corticosteroids. In one embodiment, for the purpose of preventing or alleviating CRS associated with administration of the anti-T cell antigen-binding molecule, corticosteroids are orally or intravenously administered to an individual before administration of the anti-T cell antigen-binding molecule, 2 days, 1 day, or 0 days before (on the same day as) the administration of the anti-T cell antigen-binding molecule. Alternatively, the corticosteroid is orally or intravenously administered to an individual simultaneously with the administration of the anti-T cell antigen-binding molecule (these may be referred to as “pre-administration of a corticosteroid” or “pre-administration of a steroid”). Preferably, pre-administration of a corticosteroid is performed in addition to pre-administration of a VEGF inhibitor (in combination with pre-administration of a VEGF inhibitor). Although not intended to be limiting, examples of preferred corticosteroids include dexamethasone, hydrocortisone, and methylprednisolone. Preferably, the corticosteroid is dexamethasone, a pharmaceutically acceptable salt thereof, or a derivative thereof, which is administered orally or intravenously. It will be understood by those skilled in the art that the dose of dexamethasone is not limited to the above and may be appropriately changed depending on the condition of the individual, the development of CRS, and the like.

[0500] In one embodiment, the combination therapy is carried out on the same day as administration of an anti-T cell antigen-binding molecule in the following order: (1) pre-administration of a corticosteroid, (2) pre-administration of a VEGF inhibitor, and (3) administration of an anti-T cell antigen-binding molecule. In this case, for example, administration of a corticosteroid to an individual is completed 1 hour or more, 2 hours or more, 3 hours or more, 4 hours or more, or 5 hours or more, or preferably 2 hours or more before starting the administration of a VEGF inhibitor; furthermore, administration of a VEGF inhibitor to the individual is completed 1 hour or more, 2 hours or more, 3 hours or more, 4 hours or more, or 5 hours or more, or preferably 2 hours or more before starting the administration of the anti-T cell antigen-binding molecule. In another embodiment, administration is performed on the same day as administration of an anti-T cell antigen-binding molecule in the following order: (1) pre-administration of a VEGF inhibitor, (2) pre-administration of a corticosteroid, and (3) administration of an anti-T cell antigen-binding molecule. In this case, for example, administration of a VEGF inhibitor to an individual is completed 1 hour or more, 2 hours or more, 3 hours or more, 4 hours or more, or 5 hours or more, or preferably 2 hours or more before starting the administration of a corticosteroid; furthermore, administration of the corticosteroid to the individual is completed 1 hour or more, 2 hours or more, 3 hours or more, 4 hours or more, or 5 hours or more, or preferably 2 hours or more before starting the administration of the anti-T cell antigen-binding molecule.

[0501] In a different embodiment, the combination therapy of the present disclosure does not include pre-administration of corticosteroids. Although not intended to be limiting, pre-administration of a VEGF inhibitor prevents or alleviates development of CRS associated with administration of the anti-T cell antigen-binding molecule, and administration of corticosteroids for purposes of preventing or alleviating CRS becomes unnecessary.

[0502] The combination therapies of the present disclosure may further include administration of Tocilizumab. In one embodiment, for the purpose of preventing or alleviating CRS associated with administration of the anti-T cell antigen-binding molecule, Tocilizumab is intravenously administered to an individual before administration of the anti-T cell antigen-binding molecule, 2 days, 1 day, or 0 days before (on the same day as) the administration of the anti-T cell antigen-binding molecule. Alternatively, Tocilizumab is intravenously administered to an individual simultaneously with the administration of the anti-T cell antigen-binding molecule (these may be referred to as “pre-administration of Tocilizumab” or “pre-administration of Tocilizumab”). Preferably, pre-administration of Tocilizumab is performed in addition to pre-administration of a VEGF inhibitor (in combination with pre-administration of a VEGF inhibitor). It will be understood by those skilled in the art that the dose of Tocilizumab is not limited to the above and may be appropriately changed depending on the condition of the individual, the development of CRS, and the like.

[0503] In one embodiment, the combination therapy is carried out on the same day as administration of an anti-T cell antigen-binding molecule in the following order: (1) pre-administration of Tocilizumab, (2) pre-administration of a VEGF inhibitor, and (3) administration of an anti-T cell antigen-binding molecule. In this case, for example, administration of Tocilizumab to an individual is completed 1 hour or more, 2 hours or more, 3 hours or more, 4 hours or more, or 5 hours or more, or preferably 2 hours or more before starting the administration of a VEGF inhibitor; furthermore, administration of a VEGF inhibitor to the individual is completed 1 hour or more, 2 hours or more, 3 hours or more, 4 hours or more, or 5 hours or more, or preferably 2 hours or more before starting the administration of the anti-T cell antigen-binding molecule. In another embodiment, administration is performed on the same day as administration of an anti-T cell antigen-binding molecule in the following order: (1) pre-administration of a VEGF inhibitor, (2) pre-administration of Tocilizumab, and (3) administration of an anti-T cell antigen-binding molecule. In this case, for example, administration of a VEGF inhibitor to an individual is completed 1 hour or more, 2 hours or more, 3 hours or more, 4 hours or more, or 5 hours or more, or preferably 2 hours or more before starting the administration of Tocilizumab; furthermore, administration of Tocilizumab to the individual is completed 1 hour or more, 2 hours or more, 3 hours or more, 4 hours or more, or 5 hours or more, or preferably 2 hours or more before starting the administration of the anti-T cell antigen-binding molecule.

[0504] In a different embodiment, the combination therapy of the present disclosure does not include pre-administration of Tocilizumab. Although not intended to be limiting, pre-administration of a VEGF inhibitor prevents or alleviates development of CRS associated with administration of the anti-T cell antigen-binding molecule, and administration of Tocilizumab for purposes of preventing or alleviating CRS becomes unnecessary.

[0505] It is naturally understood by those skilled in the art that the anti-T cell antigen-binding molecules, VEGF inhibitors, and/or other pharmaceutical agents in the present disclosure may all have a given “permissible range” for the timing of administration, the dosing interval, and the dose, respectively, and those skilled in the art can appropriately determine the permissible range. For example, performing timely increase or decrease of the dosing interval or appropriate increase or decrease of the dose of anti-T cell antigen-binding molecules, VEGF inhibitors, and/or other pharmaceutical agents at the discretion of the doctor, based on symptoms and such of the individual, is within the above “permissible range”.

[0506] Below, non-limiting specific examples of combination therapies comprising anti-T cell antigen-binding molecules and VEGF inhibitors are described.

Administration of an Anti-T Cell Antigen-Binding Molecule, Accompanied with Pre-Administration of a VEGF Inhibitor

[0507] In one embodiment, the present disclosure provides a pharmaceutical composition comprising an anti-T cell antigen-binding molecule, which is for use in its combination therapy with a VEGF inhibitor. In a different embodiment, the present disclosure provides a pharmaceutical composition comprising a VEGF inhibitor, which is for use in its combination therapy with an anti-T cell antigen binding molecule. In a further embodiment, a VEGF inhibitor is administered to an individual before or simultaneously with administration of the anti-T cell antigen binding molecule. Although not intended to be limiting, when a VEGF inhibitor is administered before or simultaneously with administration of the anti-T cell antigen-binding molecule, it has the effect of preventing or alleviating development of CRS associated with administration of the anti-T cell antigen-binding molecule. In one embodiment, a VEGF inhibitor is administered 6 days, 5 days, 4 days, 3 days, 2 days, or 1 day before administration of the anti-T cell antigen-binding molecule, or on the same day as but before the administration of the bispecific antibody. Alternatively, a VEGF inhibitor is administered simultaneously with the anti-T cell antigen-binding molecule on the same day as administration of the anti-T cell antigen-binding molecule. In one embodiment, pre-administration of a VEGF inhibitor prevents or alleviates development of CRS associated with administration of an anti-T cell antigen-binding molecule, without significantly impairing the efficacy of the anti-T cell antigen-binding molecule (for example, T cell-dependent cellular cytotoxicity (TDCC) and antitumor effect).

### VI. Combination Therapies with an Anti-Glypican 3 (GPC3)/T Cell Receptor Complex Bispecific Antibody and a VEGF Inhibitor

[0508] In one embodiment, the present disclosure provides a pharmaceutical composition comprising an anti-GPC3/T cell receptor complex bispecific antibody, wherein the pharmaceutical composition is for use in its combination therapy with a VEGF inhibitor. In a different embodiment, the present disclosure provides a pharmaceutical composition comprising a VEGF inhibitor, wherein the pharmaceutical composition is for use in its combination therapy with an anti-glypican 3 (GPC3)/T cell receptor complex bispecific antibody. In one embodiment, the VEGF inhibitor is administered to an individual before or simultaneously with administration of the anti-GPC3/T cell receptor complex bispecific antibody.

[0509] Although not intended to be limiting, when a VEGF inhibitor is administered before or simultaneously with administration of an anti-GPC3/T cell receptor complex bispecific antibody, the inhibitor has effects of preventing or alleviating the development of CRS associated with administration of the anti-GPC3/T cell receptor complex bispecific antibody. In one embodiment, the VEGF inhibitor is administered 6 days, 5 days, 4 days, 3 days, 2 days, or 1 day before the administration of the anti-GPC3/T cell receptor complex bispecific antibody, or on the same day as but before the administration of the bispecific antibody. Alternatively, the VEGF inhibitor is administered on the same day as administration of the anti-GPC3/T cell receptor complex bispecific antibody, and simultaneously with the bispecific antibody (pre-administration of the VEGF inhibitor). For specific examples of the combination therapy comprising pre-administration of the VEGF inhibitor, see the various embodiments described above. In one embodiment, pre-administration of the VEGF inhibitor prevents or alleviates development of CRS associated with administration of the anti-GPC3/T cell receptor complex bispecific antibody without significantly compromising the drug efficacy of the anti-GPC3/T cell receptor complex bispecific antibody (for example, T cell-dependent cellular cytotoxicity (TDCC) and antitumor effects).

### VII. Production Methods and Kits

[0510] The present invention also provides a kit for use in the method of the present invention, which comprises the anti-T cell antigen-binding molecule of the present invention or the anti-T cell antigen-binding molecule produced by the production method of the present invention. In addition, the kit may include in its package a pharmaceutically acceptable carrier, medium, instructions describing the method of use, and such.

[0511] The present invention also relates to an anti-T cell antigen-binding molecule of the present invention or an anti-T cell antigen-binding molecule produced by the production method of the present invention for use in the method of the present invention.

[0512] The present invention also provides a kit comprising a VEGF inhibitor, which is for use in the method of the present invention. In addition, the kit may include in its package a pharmaceutically acceptable carrier, medium, instructions describing the method of use, and such.

[0513] The present invention also relates to a VEGF inhibitor for use in the method of the present invention.

[0514] The present invention also relates to nucleic acids encoding these molecules, vectors into which the nucleic acids have been introduced, cells containing the nucleic acids or the vectors, methods for producing the molecules by culturing the cells, and anti-T cell antigen-binding molecules and VEGF inhibitors produced by the methods.

[0515] For example, the anti-T-cell antigen-binding molecule can be produced by introducing into an appropriate host cell, a nucleic acid encoding the anti-T cell antigen-binding molecule or a vector into which the nucleic acid has been introduced and culturing the host cell. When the anti-T cell antigen-binding molecule is secreted, the anti-T cell antigen-binding molecule of interest can be recovered from the culture supernatant. A method for purifying the anti-T cell antigen-binding molecule of interest from the culture is also known. On the other hand, if the VEGF inhibitor is a protein component such as an antibody, it can be produced in the same manner as the multispecific antigen-binding molecule by introducing into an appropriate host cell, the nucleic acid encoding the VEGF inhibitor molecule or the vector into which the nucleic acid is introduced, and culturing the host cell.

[0516] In the present disclosure, the anti-T cell antigen-binding molecule and the VEGF inhibitor can be independently packaged with a pharmaceutically acceptable carrier, medium, instructions describing the method of use, and such. Alternatively, both can be formulated and then combined to form a kit. Specifically, the kit can include, for example, a package containing a formulated anti-T cell antigen-binding molecule and a package containing a formulated VEGF inhibitor. When each of the formulations constituting the kit is a lyophilized one or a concentrated liquid formulation, a liquid medium for dissolving or diluting the formulation can be combined with the kit.

[0517] The present disclosure provides a pharmaceutical composition comprising the anti-T cell antigen-binding molecule described above, which is a pharmaceutical composition for administration with a VEGF inhibitor, for either or both of treating and preventing cancer, and which is for the purpose of any one or a combination selected from preventing, alleviating, and treating either or both of CRS and cytokine release resulting from administration of the pharmaceutical composition.

[0518] Herein, the pharmaceutical composition is not limited to a pharmaceutical composition comprising an anti-T cell antigen-binding molecule, and it may be a Chimeric Antigen Receptor (hereafter, also referred to as “CAR”)-expressing T cell (hereafter, also simply referred to as “CAR-T cell”) produced by introducing a gene encoding CAR to normal peripheral blood T cells (peripheral blood T lymphocytes). CAR is a chimeric protein formed by artificially fusing an antibody that recognizes a cell surface antigen of cancer cells and such with a signal transduction region that induces T cell activation. CAR-T cells are produced by introducing a CAR-encoding gene into peripheral blood T lymphocytes. The CAR-expressing T cells produced by such an approach are used in treatment of diseases such as cancers by adoptive immunotherapy. These CAR-T cells are reactive to antigen-expressing target cells, and become capable of damaging the target cells without depending on interaction with major histocompatibility complexes (MHCs).

[0519] Clinical trials are ongoing worldwide on cancer immunotherapy by administration of CAR-T cells, more specifically, therapy which involves collecting T cells from patients, and introducing a gene encoding CAR to these T cells, which are then cultured and expanded, and transferred to the patients again (NPL 1). Results showing that cancer immunotherapy by administration of CAR-T cells shows efficacy on, for example, hematopoietic malignant tumor such as leukemia or lymphoma have been obtained. In 2017, Kymriah (registered trademark) (Novartis, tisagenlecleucel, CTL-019, CD3 zeta-CD137) and Yescarta (registered trademark) (KiTE, axicabtagene ciloleucel, CD3 zeta-CD28), which are CAR-T against CD19 as an antigen, were approved as pharmaceuticals in the USA.

[0520] CRS and cytokine release resulting from cancer immunotherapy by administration of CAR-T cells have been reported (Lee D W, et al. Current concepts in the diagnosis and management of cytokine release syndrome. Blood. 2014 Jul. 10; 124(2): 188-95). Since it is suggested that the same CRS mechanism is initiated when a pharmaceutical composition comprising an anti-T cell antigen-binding molecule is administered and when CAR-T cells are administered, it is understood that administration of a VEGF inhibitor can prevent, alleviate, or treat cytokine release syndrome (CRS) associated with administration of CAR-T cells.

[0521] It should be noted that all prior art documents cited herein are incorporated herein by reference.

### EXAMPLE

### Example 1

### Effect of Combined Use of the Anti-Mouse VEGFR2 Antibody (DC101) on the Drug Efficacy of the ERY974 Surrogate Antibody (GC33/2C11)

[0522] A test using syngeneic mouse models to evaluate the effect of combined use of the anti-mouse VEGFR2 antibody DC101 (manufactured by Bio X Cell (US)) on the drug efficacy of the ERY974 surrogate antibody was carried out as follows. GC33/2C11 (an antibody comprising the amino acid sequence of SEQ ID NO: 433 as the GPC3-side heavy chain, the amino acid sequence of SEQ ID NO: 434 as the GPC3-side light chain, the amino acid sequence of SEQ ID NO: 435 as the CD3-side heavy chain, and the amino acid sequence of SEQ ID NO: 436 as the CD3-side light chain) was used as the ERY974 surrogate antibody.

[0523] MC38/hGPC3 cancer cells, which are mouse cancer cell line MC38 made to highly express human GPC3, were transplanted subcutaneously in C57BL/6J mice. The day of transplantation was set to day 0. On day 14, the mice were divided into four groups according to tumor size. The groups of mice were subjected to administration of (1) the vehicle, (2) GC33/2C11 (5 mg/kg), (3) the anti-mouse VEGFR2 antibody (DC101) (10 mg/kg), or (4) GC33/2C11 (5 mg/kg) and the anti-mouse VEGFR2 antibody (10 mg/kg), respectively, into the tail vein on day 14 and on day 18.

[0524] As a result, the combined use of GC33/2C1 and the anti-mouse VEGFR2 antibody enhanced the drug efficacy compared to when each antibody was used as a single drug (FIG. 1).

### Example 2

[0525] Effect of Combined Use of the Anti-Mouse VEGFR2 Antibody (DC101) on Tumor-Derived Cytokine Production Resulting from the ERY974 Surrogate Antibody (GC33/2C11)

[0526] A test using syngeneic mouse models to evaluate the effect of combined use of the anti-mouse VEGFR2 antibody (DC101) on tumor tissue-derived cytokine production resulting from the ERY974 surrogate antibody was carried out as follows.

[0527] MC38/hGPC3 cancer cells, which are mouse cancer cell line MC38 made to highly express human GPC3, were transplanted subcutaneously in C57BL/6J mice. The day of transplantation was set to day 0.

[0528] On day 13, the mice were divided into four groups according to tumor size. The groups of mice were subjected to administration of (1) the vehicle, (2) GC33/2C11 (5 mg/kg), the anti-mouse VEGFR2 antibody (10 mg/kg), or (4) GC33/2C11 (5 mg/kg) and the anti-mouse VEGFR2 antibody (10 mg/kg) into the tail vein on day 13. Blood was collected from the mice before, and 2 hours, 6 hours, and 24 hours after the antibody administration, plasma components were recovered, and cytokines in the plasma were measured. For the cytokine measurements, a Mouse Cytokine/Chemokine Magnetic Bead Panel 1 (Millipore) reagent was used, and measurements were taken using the MAGPIX® xPONT 4.2 system (Merck).

[0529] As a result, the amount of production of tumor-derived cytokines tended to be decreased in the group using GC33/2C11 and the anti-mouse VEGFR2 antibody in combination, compared to the group in which GC33/2C11 alone was administered. Therefore, this suggested that use of an angiogenesis inhibitor in combination decreases the amount of tumor-derived cytokine production due to ERY974 (FIGS. 2A to 2E).

### Example 3

[0530] Effect of Combined Use of the Anti-Mouse VEGFR2 Antibody (DC101) on Normal Tissue-Derived Cytokine Production Resulting from the ERY974 Surrogate Antibody (GC33/2C11)

[0531] A test using human GPC3 knock-in mice, to evaluate the effect of the combined use of the anti-mouse VEGFR2 antibody (DC101) on normal tissue-derived cytokine production resulting from the ERY974 surrogate antibody (GC33/2C11) was carried out as follows.

[0532] Human GPC3-expressing human GPC3 knock-in mice express human GPC3 under expression control by the mouse GPC3 promoter (WO2018/038046). Meanwhile, mice and humans have been reported to have common GPC3-positive tissues. Observation of slight expression of GPC3 in the lungs is common to both humans and mice (Clin. Cancer. Res (2004) 10, 8630-40). Therefore, administering GC33/2C11 to the human GPC3 knock-in mice described above and measuring the amount of cytokine produced will enable prediction and evaluation of the mechanism of normal tissue-derived cytokine production when ERY974 is administered to humans.

[0533] The human GPC3-expressing human GPC3 knock-in mice were divided into four groups, and they were subjected to administration into the tail vein of (1) the vehicle, (2) GC33/2C11 (5 mg/kg), (3) the anti-mouse VEGFR2 antibody (10 mg/kg), or (4) GC33/2C11 (5 mg/kg) and the anti-mouse VEGFR2 antibody (10 mg/kg). Blood was collected from the mice before and 2 hours after the antibody administration, plasma components were recovered, and cytokines in the plasma were measured. For the cytokine measurements, a Mouse Cytokine/Chemokine Magnetic Bead Panel 1 (Millipore) reagent was used, and measurements were taken using a MAGPIX® xPONT 4.2 system (Merck).

[0534] As a result, the amount of production of normal tissue-derived cytokines tended to be decreased in the group using GC33/2C11 and the anti-mouse VEGFR2 antibody in combination, compared to the group in which GC33/2C11 alone was administered. Therefore, this suggested that use of an angiogenesis inhibitor in combination decreases the amount of normal tissue-derived cytokine production due to ERY974 (FIG. 3).

### INDUSTRIAL APPLICABILITY

[0535] The present disclosure is useful for preventing, alleviating, or treating adverse reactions caused by cytokine production associated with administration of anti-T cell antigen-binding molecules and the like. Anti-T cell antigen-binding molecules are drawing attention as means for treating cancer. Therefore, in some embodiments, the present disclosure is useful in treatment of cancer with anti-T cell antigen-binding molecules.

1. A method for treating cancer comprising, administering an anti-T cell antigen-binding molecule and a vascular epithelial cell growth factor (VEGF) inhibitor to a subject, wherein the method further prevents and/or alleviates and/or treats cytokine release syndrome and/or cytokine release.

2. The method of claim 1, wherein the VEGF inhibitor is administered before or simultaneously with administration of the anti-T cell antigen-binding molecule.

3. The method of claim 1, wherein the VEGF inhibitor is administered 6 days, 5 days, 4 days, 3 days, 2 days, or 1 day before the administration of the anti-T cell antigen-binding molecule, or on the same day as but before administration of the anti-T cell antigen-binding molecule.

4. The method of claim 1, wherein the VEGF inhibitor is selected from the group consisting of an anti-VEGF antigen-binding molecule, an anti-VEGFR1 antigen-binding molecule, an anti-VEGFR2 antigen-binding molecule, a fusion protein comprising a VEGF receptor or a fragment thereof, and a tyrosine kinase inhibitor.

5. The method of claim 1, wherein the VEGF inhibitor is selected from the group consisting of Bevacizumab, Ramucirumab, and Aflibercept.

6. The method of claim 1, wherein a corticosteroid is not administered before or simultaneously with the administration of the anti-T cell antigen-binding molecule.

7. The method of claim 1, wherein a corticosteroid is further administered before, simultaneously with, or after the administration of the anti-T cell antigen-binding molecule.

8. The method of claim 6, wherein the corticosteroid is dexamethasone, a pharmaceutically acceptable salt thereof, or a derivative thereof.

9. The method of claim 1, wherein the anti-T cell antigen-binding molecule is a bispecific antigen-binding molecule comprising:
(1) a domain comprising an antibody variable region having T cell receptor complex-binding activity; and
(2) a domain comprising an antibody variable region having cancer antigen-binding activity.

10. The method of claim 1, wherein the anti-T cell antigen-binding molecule is a bispecific antibody comprising:
(1) a domain comprising an antibody variable region having T cell receptor complex-binding activity;
(2) a domain comprising an antibody variable region having glypican 3-binding activity; and
(3) a domain comprising an Fc region with reduced binding activity towards an Fey receptor.

11. (canceled)

12. The method of claim 1, wherein the cancer treatment is enhanced by the combined administration of the anti-T cell antigen-binding molecule and VEGF inhibitor as compared to when the anti-T cell antigen-binding molecule or the VEGF inhibitor is administered as a single drug.

13. The method of claim 1, claim 1, wherein the cytokine release syndrome is caused by cytokine release from either or both of a non-tumor tissue and a tumor tissue.

14. The method of claim 13, wherein the tumor tissue comprises GPC3-expressing cells.

15. A method for preventing, alleviating and/or treating cytokine release syndrome or cytokine release comprising, administering a vascular epithelial cell growth factor (VEGF) inhibitor to a subject.

16. The method of claim 15, wherein the VEGF inhibitor is selected from the group consisting of an anti-VEGF antigen-binding molecule, an anti-VEGFR1 antigen-binding molecule, an anti-VEGFR2 antigen-binding molecule, a fusion protein comprising a VEGF receptor or a fragment thereof, and a tyrosine kinase inhibitor.

17. The method of claim 15, wherein the VEGF inhibitor is selected from the group consisting of Bevacizumab, Ramucirumab, and Aflibercept.

18. The method of claim 15, which is for treatment of cancer.

19. The method of claim 15, wherein the VEGF inhibitor is administered in combination with cancer immunotherapy.

20. The method of claim 19, wherein the VEGF inhibitor is administered before or simultaneously with the cancer immunotherapy.

21. The method of claim 18, wherein the VEGF inhibitor is administered 6 days, 5 days, 4 days, 3 days, 2 days, or 1 day before the administration of the cancer immunotherapy.

22. The method of claim 19, wherein the cancer immunotherapy is the administration of an anti-T cell antigen-binding molecule, a Chimeric Antigen Receptor expressing T cell (CAR-T cell), or an immune checkpoint inhibitor.

23. The method of claim 19, wherein the administered bispecific anti-T cell antigen-binding molecule comprises:
(1) a domain comprising an antibody variable region having T cell receptor complex-binding activity; and
(2) a domain comprising an antibody variable region having cancer antigen-binding activity.

24. The method of claim 19, wherein the administered bispecific anti-T cell antigen-binding molecule comprises:
(1) a domain comprising an antibody variable region having T cell receptor complex-binding activity;
(2) a domain comprising an antibody variable region having cancer antigen-binding activity; and
(3) a domain comprising an Fc region with reduced binding activity towards an Fey receptor.

25. The method of claim 15, wherein the VEGF inhibitor is administered in combination with a corticosteroid.

26. The method of claim 19, wherein the VEGF inhibitor is administered in combination with cancer immunotherapy and a corticosteroid.

The application's sequence listing, which the Patent Office published only in electronic form, follows.

SEQUENCE LISTING (436 sequences)

SEQ ID NO: 1 - DNA, 2398 bp, Homo sapiens
agccccgccctgccccgcgccgccaagcggttcccgccctcgcccagcgcccaggtagctgcgaggaaacttttgcagcggctgggtagcagcacgtctcttgctcctcagggccactgccaggcttgccgagtcctgggactgctctcgctccggctgccactctcccgcgctctcctagctccctgcgaagcaggatggccgggaccgtgcgcaccgcgtgcttggtggtggcgatgctgctcagcttggacttcccgggacaggcgcagcccccgccgccgccgccggacgccacctgtcaccaagtccgctccttcttccagagactgcagcccggactcaagtgggtgccagaaactcccgtgccaggatcagatttgcaagtatgtctccctaagggcccaacatgctgctcaagaaagatggaagaaaaataccaactaacagcacgattgaacatggaacagctgcttcagtctgcaagtatggagctcaagttcttaattattcagaatgctgcggttttccaagaggcctttgaaattgttgttcgccatgccaagaactacaccaatgccatgttcaagaacaactacccaagcctgactccacaagcttttgagtttgtgggtgaatttttcacagatgtgtctctctacatcttgggttctgacatcaatgtagatgacatggtcaatgaattgtttgacagcctgtttccagtcatctatacccagctaatgaacccaggcctgcctgattcagccttggacatcaatgagtgcctccgaggagcaagacgtgacctgaaagtatttgggaatttccccaagcttattatgacccaggtttccaagtcactgcaagtcactaggatcttccttcaggctctgaatcttggaattgaagtgatcaacacaactgatcacctgaagttcagtaaggactgtggccgaatgctcaccagaatgtggtactgctcttactgccagggactgatgatggttaaaccctgtggcggttactgcaatgtggtcatgcaaggctgtatggcaggtgtggtggagattgacaagtactggagagaatacattctgtcccttgaagaacttgtgaatggcatgtacagaatctatgacatggagaacgtactgcttggtctcttttcaacaatccatgattctatccagtatgtccagaagaatgcaggaaagctgaccaccactgaaactgagaagaaaatatggcacttcaaatatcctatcttcttcctgtgtatagggctagacttacagattggcaagttatgtgcccattctcaacaacgccaatatagatctgcttattatcctgaagatctctttattgacaagaaagtattaaaagttgctcatgtagaacatgaagaaaccttatccagccgaagaagggaactaattcagaagttgaagtctttcatcagcttctatagtgctttgcctggctacatctgcagccatagccctgtggcggaaaacgacaccctttgctggaatggacaagaactcgtggagagatacagccaaaaggcagcaaggaatggaatgaaaaaccagttcaatctccatgagctgaaaatgaagggccctgagccagtggtcagtcaaattattgacaaactgaagcacattaaccagctcctgagaaccatgtctatgcccaaaggtagagttctggataaaaacctggatgaggaagggtttgaaagtggagactgcggtgatgatgaagatgagtgcattggaggctctggtgatggaatgataaaagtgaagaatcagctccgcttccttgcagaactggcctatgatctggatgtggatgatgcgcctggaaacagtcagcaggcaactccgaaggacaacgagataagcacctttcacaacctcgggaacgttcattccccgctgaagcttctcaccagcatggccatctcggtggtgtgcttcttcttcctggtgcactgactgcctggtgcccagcacatgtgctgccctacagcaccctgtggtcttcctcgataaagggaaccactttcttatttttttctatttttttttttttgttatcctgtatacctcctccagccatgaagtagaggactaaccatgtgttatgttttcgaaaatcaaatggtatcttttggaggaagatacattttagtggtagcatatagattgtccttttgcaaagaaagaaaaaaaaccatcaagttgtgccaaattattctcctatgtttggctgctagaacatggttaccatgtctttctctctcactccctccctttctatcgttctctctttgcatggatttctttgaaaaaaaataaattgctcaaataaaaaaaaaaaaaaa

SEQ ID NO: 2 - protein, 603 aa, Homo sapiens
MAGTVRTACLVVAMLLSLDFPGQAQPPPPPPDATCHQVRSFFQRLQPGLKWVPETPVPGSDLQVCLPKGPTCCSRKMEEKYQLTARLNMEQLLQSASMELKFLIIQNAAVFQEAFEIVVRHAKNYTNAMFKNNYPSLTPQAFEFVGEFFTDVSLYILGSDINVDDMVNELFDSLFPVIYTQLMNPGLPDSALDINECLRGARRDLKVFGNFPKLIMTQVSKSLQVTRIFLQALNLGIEVINTTDHLKFSKDCGRMLTRMWYCSYCQGLMMVKPCGGYCNVVMQGCMAGVVEIDKYWREYILSLEELVNGMYRIYDMENVLLGLFSTIHDSIQYVQKNAGKLTTTETEKKIWHFKYPIFFLCIGLDLQIGKLCAHSQQRQYRSAYYPEDLFIDKKVLKVAHVEHEETLSSRRRELIQKLKSFISFYSALPGYICSHSPVAENDTLCWNGQELVERYSQKAARNGMKNQFNLHELKMKGPEPVVSQIIDKLKHINQLLRTMSMPKGRVLDKNLDEEGFESGDCGDDEDECIGGSGDGMIKVKNQLRFLAELAYDLDVDDAPGNSQQATPKDNEISTFHNLGNVHSPLKLLTSMAISVVCFFFLVH

SEQ ID NO: 3 - protein, 19 aa, Artificial
  An artificially generated sequence
MGWSCIILFLVATATGVHS

SEQ ID NO: 4 - protein, 141 aa, Homo sapiens
DIQNPDPAVYQLRDSKSSDKSVCLFTDFDSQTNVSQSKDSDVYITDKTVLDMRSMDFKSNSAVAWSNKSDFACANAFNNSIIPEDTFFPSPESSCDVKLVEKSFETDTNLNFQNLSVIGFRILLLKVAGFNLLMTLRLWSS

SEQ ID NO: 5 - protein, 179 aa, Homo sapiens
EDLKNVFPPEVAVFEPSEAEISHTQKATLVCLATGFYPDHVELSWWVNGKEVHSGVSTDPQPLKEQPALNDSRYCLSSRLRVSATFWQNPRNHFRCQVQFYGLSENDEWTQDRAKPVTQIVSAEAWGRADCGFTSESYQQGVLSATILYEILLGKATLYAVLVSALVLMAMVKRKDSRG

SEQ ID NO: 6 - protein, 173 aa, Homo sapiens
DKQLDADVSPKPTIFLPSIAETKLQKAGTYLCLLEKFFPDVIKIHWQEKKSNTILGSQEGNTMKTNDTYMKFSWLTVPEKSLDKEHRCIVRHENNKNGVDQEIIFPPIKTDVITMDPKDNCSKDANDTLLLQLTNTSAYYMYLLLLLKSVVYFAIITCCLLRRTAFCCNGEKS

SEQ ID NO: 7 - protein, 204 aa, Homo sapiens
KQLDADVSPKPTIFLPSIAETKLQKAGTYLCLLEKFFPDIIKIHWQEKKSNTILGSQEGNTMKTNDTYMKFSWLTVPEESLDKEHRCIVRHENNKNGIDQEIIFPPIKTDVTTVDPKDSYSKDANDVTTVDPKYNYSKDANDVITMDPKDNWSKDANDTLLLQLTNTSAYYMYLLLLLKSVVYFAIITCCLLGRTAFCCNGEKS

SEQ ID NO: 8 - protein, 177 aa, Homo sapiens
PSYTGGYADKLIFGKGTRVTVEPRSQPHTKPSVFVMKNGTNVACLVKEFYPKDIRINLVSSKKITEFDPAIVISPSGKYNAVKLGKYEDSNSVTCSVQHDNKTVHSTDFEVKTDSTDHVKPKETENTKQPSKSCHKPKAIVHTEKVNMMSLTVLGLRMLFAKTVAVNFLLTAKLFFL

SEQ ID NO: 9 - DNA, 1311 bp, Homo sapiens
agtctagctgctgcacaggctggctggctggctggctgctaagggctgctccacgcttttgccggaggacagagactgacatggaacaggggaagggcctggctgtcctcatcctggctatcattcttcttcaaggtactttggcccagtcaatcaaaggaaaccacttggttaaggtgtatgactatcaagaagatggttcggtacttctgacttgtgatgcagaagccaaaaatatcacatggtttaaagatgggaagatgatcggcttcctaactgaagataaaaaaaaatggaatctgggaagtaatgccaaggaccctcgagggatgtatcagtgtaaaggatcacagaacaagtcaaaaccactccaagtgtattacagaatgtgtcagaactgcattgaactaaatgcagccaccatatctggctttctctttgctgaaatcgtcagcattttcgtccttgctgttggggtctacttcattgctggacaggatggagttcgccagtcgagagcttcagacaagcagactctgttgcccaatgaccagctctaccagcccctcaaggatcgagaagatgaccagtacagccaccttcaaggaaaccagttgaggaggaattgaactcaggactcagagtagtccaggtgttctcctcctattcagttcccagaatcaaagcaatgcattttggaaagctcctagcagagagactttcagccctaaatctagactcaaggttcccagagatgacaaatggagaagaaaggccatcagagcaaatttgggggtttctcaaataaaataaaaataaaaacaaatactgtgtttcagaagcgccacctattggggaaaattgtaaaagaaaaatgaaaagatcaaataaccccctggatttgaatataattttttgtgttgtaatttttatttcgtttttgtataggttataattcacatggctcaaatattcagtgaaagctctccctccaccgccatcccctgctacccagtgaccctgttgccctcttcagagacaaattagtttctcttttttttttttttttttttttttttgagacagtctggctctgtcacccaggctgaaatgcagtggcaccatctcggctcactgcaacctctgcctcctgggttcaagcgattctcctgcctcagcctcccgggcagctgggattacaggcacacactaccacacctggctaatttttgtatttttagtagagacagggttttgctctgttggccaagctggtctcgaactcctgacctcaagtgatccgcccgcctc

SEQ ID NO: 10 - DNA, 771 bp, Homo sapiens
agagaagcagacatcttctagttcctcccccactctcctctttccggtacctgtgagtcagctaggggagggcagctctcacccaggctgatagttcggtgacctggctttatctactggatgagttccgctgggagatggaacatagcacgtttctctctggcctggtactggctacccttctctcgcaagtgagccccttcaagatacctatagaggaacttgaggacagagtgtttgtgaattgcaataccagcatcacatgggtagagggaacggtgggaacactgctctcagacattacaagactggacctgggaaaacgcatcctggacccacgaggaatatataggtgtaatgggacagatatatacaaggacaaagaatctaccgtgcaagttcattatcgaatgtgccagagctgtgtggagctggatccagccaccgtggctggcatcattgtcactgatgtcattgccactctgctccttgctttgggagtcttctgctttgctggacatgagactggaaggctgtctggggctgccgacacacaagctctgttgaggaatgaccaggtctatcagcccctccgagatcgagatgatgctcagtacagccaccttggaggaaactgggctcggaacaagtgaacctgagactggtggcttctagaagcagccattaccaactgtaccttcccttcttgctcagccaataaatatatcctctttcactcagaaaaaaaaaaaaaaaaaaaaaaaaaaaaaa

SEQ ID NO: 11 - DNA, 1534 bp, Homo sapiens
tattgtcagagtcctcttgtttggccttctaggaaggctgtgggacccagctttcttcaaccagtccaggtggaggcctctgccttgaacgtttccaagtgaggtaaaacccgcaggcccagaggcctctctacttcctgtgtggggttcagaaaccctcctcccctcccagcctcaggtgcctgcttcagaaaatgaagtagtaagtctgctggcctccgccatcttagtaaagtaacagtcccatgaaacaaagatgcagtcgggcactcactggagagttctgggcctctgcctcttatcagttggcgtttgggggcaagatggtaatgaagaaatgggtggtattacacagacaccatataaagtctccatctctggaaccacagtaatattgacatgccctcagtatcctggatctgaaatactatggcaacacaatgataaaaacataggcggtgatgaggatgataaaaacataggcagtgatgaggatcacctgtcactgaaggaattttcagaattggagcaaagtggttattatgtctgctaccccagaggaagcaaaccagaagatgcgaacttttatctctacctgagggcaagagtgtgtgagaactgcatggagatggatgtgatgtcggtggccacaattgtcatagtggacatctgcatcactgggggcttgctgctgctggtttactactggagcaagaatagaaaggccaaggccaagcctgtgacacgaggagcgggtgctggcggcaggcaaaggggacaaaacaaggagaggccaccacctgttcccaacccagactatgagcccatccggaaaggccagcgggacctgtattctggcctgaatcagagacgcatctgaccctctggagaacactgcctcccgctggcccaggtctcctctccagtccccctgcgactccctgtttcctgggctagtcttggaccccacgagagagaatcgttcctcagcctcatggtgaactcgcgccctccagcctgatcccccgctccctcctccctgccttctctgctggtacccagtcctaaaatattgctgcttcctcttcctttgaagcatcatcagtagtcacaccctcacagctggcctgccctcttgccaggatatttatttgtgctattcactcccttccctttggatgtaacttctccgttcagttccctccttttcttgcatgtaagttgtcccccatcccaaagtattccatctacttttctatcgccgtccccttttgcagccctctctggggatggactgggtaaatgttgacagaggccctgccccgttcacagatcctggccctgagccagccctgtgctcctccctcccccaacactccctaccaaccccctaatcccctactccctccaccccccctccactgtaggccactggatggtcatttgcatctccgtaaatgtgctctgctcctcagctgagagagaaaaaaataaactgtatttggctgcaagaaaaaaaaaaaaaaaaaaaaaa

SEQ ID NO: 12 - protein, 182 aa, Homo sapiens
MEQGKGLAVLILAIILLQGTLAQSIKGNHLVKVYDYQEDGSVLLTCDAEAKNITWFKDGKMIGFLTEDKKKWNLGSNAKDPRGMYQCKGSQNKSKPLQVYYRMCQNCIELNAATISGFLFAEIVSIFVLAVGVYFIAGQDGVRQSRASDKQTLLPNDQLYQPLKDREDDQYSHLQGNQLRRN

SEQ ID NO: 13 - protein, 171 aa, Homo sapiens
MEHSTFLSGLVLATLLSQVSPFKIPIEELEDRVFVNCNTSITWVEGTVGTLLSDITRLDLGKRILDPRGIYRCNGTDIYKDKESTVQVHYRMCQSCVELDPATVAGIIVTDVIATLLLALGVFCFAGHETGRLSGAADTQALLRNDQVYQPLRDRDDAQYSHLGGNWARNK

SEQ ID NO: 14 - protein, 207 aa, Homo sapiens
MQSGTHWRVLGLCLLSVGVWGQDGNEEMGGITQTPYKVSISGTTVILTCPQYPGSEILWQHNDKNIGGDEDDKNIGSDEDHLSLKEFSELEQSGYYVCYPRGSKPEDANFYLYLRARVCENCMEMDVMSVATIVIVDICITGGLLLLVYYWSKNRKAKAKPVTRGAGAGGRQRGQNKERPPPVPNPDYEPIRKGQRDLYSGLNQRRI

SEQ ID NO: 15 - protein, 4 aa, Artificial
  An artificially generated sequence
GGGS

SEQ ID NO: 16 - protein, 4 aa, Artificial
  An artificially generated sequence
SGGG

SEQ ID NO: 17 - protein, 5 aa, Artificial
  An artificially generated sequence
GGGGS

SEQ ID NO: 18 - protein, 5 aa, Artificial
  An artificially generated sequence
SGGGG

SEQ ID NO: 19 - protein, 6 aa, Artificial
  An artificially generated sequence
GGGGGS

SEQ ID NO: 20 - protein, 6 aa, Artificial
  An artificially generated sequence
SGGGGG

SEQ ID NO: 21 - protein, 7 aa, Artificial
  An artificially generated sequence
GGGGGGS

SEQ ID NO: 22 - protein, 7 aa, Artificial
  An artificially generated sequence
SGGGGGG

SEQ ID NO: 23 - protein, 330 aa, Homo sapiens [sequence omitted]

SEQ ID NO: 24 - protein, 326 aa, Homo sapiens
ASTKGPSVFPLAPCSRSTSESTAALGCLVKDYFPEPVTVSWNSGALTSGVHTFPAVLQSSGLYSLSSVVTVPSSNFGTQTYTCNVDHKPSNTKVDKTVERKCCVECPPCPAPPVAGPSVFLFPPKPKDTLMISRTPEVTCVVVDVSHEDPEVQFNWYVDGVEVHNAKTKPREEQFNSTFRVVSVLTVVHQDWLNGKEYKCKVSNKGLPAPIEKTISKTKGQPREPQVYTLPPSREEMTKNQVSLTCLVKGFYPSDIAVEWESNGQPENNYKTTPPMLDSDGSFFLYSKLTVDKSRWQQGNVFSCSVMHEALHNHYTQKSLSLSPGK

SEQ ID NO: 25 - protein, 377 aa, Homo sapiens
ASTKGPSVFPLAPCSRSTSGGTAALGCLVKDYFPEPVTVSWNSGALTSGVHTFPAVLQSSGLYSLSSVVTVPSSSLGTQTYTCNVNHKPSNTKVDKRVELKTPLGDTTHTCPRCPEPKSCDTPPPCPRCPEPKSCDTPPPCPRCPEPKSCDTPPPCPRCPAPELLGGPSVFLFPPKPKDTLMISRTPEVTCVVVDVSHEDPEVQFKWYVDGVEVHNAKTKPREEQYNSTFRVVSVLTVLHQDWLNGKEYKCKVSNKALPAPIEKTISKTKGQPREPQVYTLPPSREEMTKNQVSLTCLVKGFYPSDIAVEWESSGQPENNYNTTPPMLDSDGSFFLYSKLTVDKSRWQQGNIFSCSVMHEALHNRFTQKSLSLSPGK

SEQ ID NO: 26 - protein, 327 aa, Homo sapiens
ASTKGPSVFPLAPCSRSTSESTAALGCLVKDYFPEPVTVSWNSGALTSGVHTFPAVLQSSGLYSLSSVVTVPSSSLGTKTYTCNVDHKPSNTKVDKRVESKYGPPCPSCPAPEFLGGPSVFLFPPKPKDTLMISRTPEVTCVVVDVSQEDPEVQFNWYVDGVEVHNAKTKPREEQFNSTYRVVSVLTVLHQDWLNGKEYKCKVSNKGLPSSIEKTISKAKGQPREPQVYTLPPSQEEMTKNQVSLTCLVKGFYPSDIAVEWESNGQPENNYKTTPPVLDSDGSFFLYSRLTVDKSRWQEGNVFSCSVMHEALHNHYTQKSLSLSLGK

SEQ ID NO: 27 - DNA, 2268 bp, Homo sapiens
aatatcttgcatgttacagatttcactgctcccaccagcttggagacaacatgtggttcttgacaactctgctcctttgggttccagttgatgggcaagtggacaccacaaaggcagtgatcactttgcagcctccatgggtcagcgtgttccaagaggaaaccgtaaccttgcactgtgaggtgctccatctgcctgggagcagctctacacagtggtttctcaatggcacagccactcagacctcgacccccagctacagaatcacctctgccagtgtcaatgacagtggtgaatacaggtgccagagaggtctctcagggcgaagtgaccccatacagctggaaatccacagaggctggctactactgcaggtctccagcagagtcttcacggaaggagaacctctggccttgaggtgtcatgcgtggaaggataagctggtgtacaatgtgctttactatcgaaatggcaaagcctttaagtttttccactggaattctaacctcaccattctgaaaaccaacataagtcacaatggcacctaccattgctcaggcatgggaaagcatcgctacacatcagcaggaatatctgtcactgtgaaagagctatttccagctccagtgctgaatgcatctgtgacatccccactcctggaggggaatctggtcaccctgagctgtgaaacaaagttgctcttgcagaggcctggtttgcagctttacttctccttctacatgggcagcaagaccctgcgaggcaggaacacatcctctgaataccaaatactaactgctagaagagaagactctgggttatactggtgcgaggctgccacagaggatggaaatgtccttaagcgcagccctgagttggagcttcaagtgcttggcctccagttaccaactcctgtctggtttcatgtccttttctatctggcagtgggaataatgtttttagtgaacactgttctctgggtgacaatacgtaaagaactgaaaagaaagaaaaagtgggatttagaaatctctttggattctggtcatgagaagaaggtaatttccagccttcaagaagacagacatttagaagaagagctgaaatgtcaggaacaaaaagaagaacagctgcaggaaggggtgcaccggaaggagccccagggggccacgtagcagcggctcagtgggtggccatcgatctggaccgtcccctgcccacttgctccccgtgagcactgcgtacaaacatccaaaagttcaacaacaccagaactgtgtgtctcatggtatgtaactcttaaagcaaataaatgaactgacttcaactgggatacatttggaaatgtggtcatcaaagatgacttgaaatgaggcctactctaaagaattcttgaaaaacttacaagtcaagcctagcctgataatcctattacatagtttgaaaaatagtattttatttctcagaacaaggtaaaaaggtgagtgggtgcatatgtacagaagattaagacagagaaacagacagaaagagacacacacacagccaggagtgggtagatttcagggagacaagagggaatagtatagacaataaggaaggaaatagtacttacaaatgactcctaagggactgtgagactgagagggctcacgcctctgtgttcaggatacttagttcatggcttttctctttgactttactaaaagagaatgtctccatacgcgttctaggcatacaagggggtaactcatgatgagaaatggatgtgttattcttgccctctcttttgaggctctctcataacccctctatttctagagacaacaaaaatgctgccagtcctaggcccctgccctgtaggaaggcagaatgtaactgttctgtttgtttaacgattaagtccaaatctccaagtgcggcactgcaaagagacgcttcaagtggggagaagcggcgataccatagagtccagatcttgcctccagagatttgctttaccttcctgattttctggttactaattagcttcaggatacgctgctctcatacttgggctgtagtttggagacaaaatattttcctgccactgtgtaacatagctgaggtaaaaactgaactatgtaaatgactctactaaaagtttagggaaaaaaaacaggaggagtatgacacaaaaaaaaaaaaaaaaaaaaaaaaaaaaaaaaaaaaaaaaaaaaaaaaaaaaaaaaaaaaaaaaaaaaaaaaaaaaaaaaaaaaaaaaaaaaa

SEQ ID NO: 28 - protein, 374 aa, Homo sapiens
MWFLTTLLLWVPVDGQVDTTKAVITLQPPWVSVFQEETVTLHCEVLHLPGSSSTQWFLNGTATQTSTPSYRITSASVNDSGEYRCQRGLSGRSDPIQLEIHRGWLLLQVSSRVFTEGEPLALRCHAWKDKLVYNVLYYRNGKAFKFFHWNSNLTILKTNISHNGTYHCSGMGKHRYTSAGISVTVKELFPAPVLNASVTSPLLEGNLVTLSCETKLLLQRPGLQLYFSFYMGSKTLRGRNTSSEYQILTARREDSGLYWCEAATEDGNVLKRSPELELQVLGLQLPTPVWFHVLFYLAVGIMFLVNTVLWVTIRKELKRKKKWDLEISLDSGHEKKVISSLQEDRHLEEELKCQEQKEEQLQEGVHRKEPQGAT

SEQ ID NO: 29 - DNA, 1396 bp, Homo sapiens
gggatgactatggagacccaaatgtctcagaatgtatgtcccagaaacctgtggctgcttcaaccattgacagttttgctgctgctggcttctgcagacagtcaagctgctcccccaaaggctgtgctgaaacttgagcccccgtggatcaacgtgctccaggaggactctgtgactctgacatgccagggggctcgcagccctgagagcgactccattcagtggttccacaatgggaatctcattcccacccacacgcagcccagctacaggttcaaggccaacaacaatgacagcggggagtacacgtgccagactggccagaccagcctcagcgaccctgtgcatctgactgtgctttccgaatggctggtgctccagacccctcacctggagttccaggagggagaaaccatcatgctgaggtgccacagctggaaggacaagcctctggtcaaggtcacattcttccagaatggaaaatcccagaaattctcccatttggatcccaccttctccatcccacaagcaaaccacagtcacagtggtgattaccactgcacaggaaacataggctacacgctgttctcatccaagcctgtgaccatcactgtccaagtgcccagcatgggcagctcttcaccaatgggggtcattgtggctgtggtcattgcgactgctgtagcagccattgttgctgctgtagtggccttgatctactgcaggaaaaagcggatttcagccaattccactgatcctgtgaaggctgcccaatttgagccacctggacgtcaaatgattgccatcagaaagagacaacttgaagaaaccaacaatgactatgaaacagctgacggcggctacatgactctgaaccccagggcacctactgacgatgataaaaacatctacctgactcttcctcccaacgaccatgtcaacagtaataactaaagagtaacgttatgccatgtggtcatactctcagcttgctgagtggatgacaaaaagaggggaattgttaaaggaaaatttaaatggagactggaaaaatcctgagcaaacaaaaccacctggcccttagaaatagctttaactttgcttaaactacaaacacaagcaaaacttcacggggtcatactacatacaagcataagcaaaacttaacttggatcatttctggtaaatgcttatgttagaaataagacaaccccagccaatcacaagcagcctactaacatataattaggtgactagggactttctaagaagatacctacccccaaaaaacaattatgtaattgaaaaccaaccgattgcctttattttgcttccacattttcccaataaatacttgcctgtgactaaaaaaaaaaaaaaaaaaaaaaaaaaaaaa

SEQ ID NO: 30 - protein, 316 aa, Homo sapiens
MTMETQMSQNVCPRNLWLLQPLTVLLLLASADSQAAPPKAVLKLEPPWINVLQEDSVTLTCQGARSPESDSIQWFHNGNLIPTHTQPSYRFKANNNDSGEYTCQTGQTSLSDPVHLTVLSEWLVLQTPHLEFQEGETIMLRCHSWKDKPLVKVTFFQNGKSQKFSHLDPTFSIPQANHSHSGDYHCTGNIGYTLFSSKPVTITVQVPSMGSSSPMGVIVAVVIATAVAAIVAAVVALIYCRKKRISANSTDPVKAAQFEPPGRQMIAIRKRQLEETNNDYETADGGYMTLNPRAPTDDDKNIYLTLPPNDHVNSNN

SEQ ID NO: 31 - DNA, 1497 bp, Homo sapiens
tgtgactgctgtgctctgggcgccagctcgctccagggagtgatgggaatcctgtcattcttacctgtccttgccactgagagtgactgggctgactgcaagtccccccagccttggggtcatatgcttctgtggacagctgtgctattcctggctcctgttgctgggacacctgcagctcccccaaaggctgtgctgaaactcgagccccagtggatcaacgtgctccaggaggactctgtgactctgacatgccgggggactcacagccctgagagcgactccattcagtggttccacaatgggaatctcattcccacccacacgcagcccagctacaggttcaaggccaacaacaatgacagcggggagtacacgtgccagactggccagaccagcctcagcgaccctgtgcatctgactgtgctttctgagtggctggtgctccagacccctcacctggagttccaggagggagaaaccatcgtgctgaggtgccacagctggaaggacaagcctctggtcaaggtcacattcttccagaatggaaaatccaagaaattttcccgttcggatcccaacttctccatcccacaagcaaaccacagtcacagtggtgattaccactgcacaggaaacataggctacacgctgtactcatccaagcctgtgaccatcactgtccaagctcccagctcttcaccgatggggatcattgtggctgtggtcactgggattgctgtagcggccattgttgctgctgtagtggccttgatctactgcaggaaaaagcggatttcagccaatcccactaatcctgatgaggctgacaaagttggggctgagaacacaatcacctattcacttctcatgcacccggatgctctggaagagcctgatgaccagaaccgtatttagtctccattgtcttgcattgggatttgagaagaaaatcagagagggaagatctggtatttcctggcctaaattccccttggggaggacagggagatgctgcagttccaaaagagaaggtttcttccagagtcatctacctgagtcctgaagctccctgtcctgaaagccacagacaatatggtcccaaataaccgactgcaccttctgtgcttcagctcttcttgacatcaaggctcttccgttccacatccacacagccaatccaattaatcaaaccactgttattaacagataatagcaacttgggaaatgcttatgttacaggttacgtgagaacaatcatgtaaatctatatgatttcagaaatgttaaaatagactaacctctaccagcacattaaaagtgattgtttctgggtgataaaattattgatgatttttattttctttatttttctataaagatcatatattacttttataataaaacattataaaaacaaaaaaaaaaaaaaaaaaaaaaaaaaaaaaaaaaaaaaaaaaaaaaaaaaaaaaaaaaaaaaaaaaaaaaaaaaaaaaa

SEQ ID NO: 32 - protein, 291 aa, Homo sapiens
MGILSFLPVLATESDWADCKSPQPWGHMLLWTAVLFLAPVAGTPAAPPKAVLKLEPQWINVLQEDSVTLTCRGTHSPESDSIQWFHNGNLIPTHTQPSYRFKANNNDSGEYTCQTGQTSLSDPVHLTVLSEWLVLQTPHLEFQEGETIVLRCHSWKDKPLVKVTFFQNGKSKKFSRSDPNFSIPQANHSHSGDYHCTGNIGYTLYSSKPVTITVQAPSSSPMGIIVAVVTGIAVAAIVAAVVALIYCRKKRISANPTNPDEADKVGAENTITYSLLMHPDALEEPDDQNRI

SEQ ID NO: 33 - DNA, 2137 bp, Homo sapiens
cttgtccactccagtgtggcatcatgtggcagctgctcctcccaactgctctgctacttctagtttcagctggcatgcggactgaagatctcccaaaggctgtggtgttcctggagcctcaatggtacagggtgctcgagaaggacagtgtgactctgaagtgccagggagcctactcccctgaggacaattccacacagtggtttcacaatgagagcctcatctcaagccaggcctcgagctacttcattgacgctgccacagttgacgacagtggagagtacaggtgccagacaaacctctccaccctcagtgacccggtgcagctagaagtccatatcggctggctgttgctccaggcccctcggtgggtgttcaaggaggaagaccctattcacctgaggtgtcacagctggaagaacactgctctgcataaggtcacatatttacagaatggcaaaggcaggaagtattttcatcataattctgacttctacattccaaaagccacactcaaagacagcggctcctacttctgcagggggcttgttgggagtaaaaatgtgtcttcagagactgtgaacatcaccatcactcaaggtttgtcagtgtcaaccatctcatcattctttccacctgggtaccaagtctctttctgcttggtgatggtactcctttttgcagtggacacaggactatatttctctgtgaagacaaacattcgaagctcaacaagagactggaaggaccataaatttaaatggagaaaggaccctcaagacaaatgacccccatcccatgggggtaataagagcagtagcagcagcatctctgaacatttctctggatttgcaaccccatcatcctcaggcctctctacaagcagcaggaaacatagaactcagagccagatcccttatccaactctcgacttttccttggtctccagtggaagggaaaagcccatgatcttcaagcagggaagccccagtgagtagctgcattcctagaaattgaagtttcagagctacacaaacactttttctgtcccaaccgttccctcacagcaaagcaacaatacaggctagggatggtaatcctttaaacatacaaaaattgctcgtgttataaattacccagtttagaggggaaaaaaaaacaattattcctaaataaatggataagtagaattaatggttgaggcaggaccatacagagtgtgggaactgctggggatctagggaattcagtgggaccaatgaaagcatggctgagaaatagcaggtagtccaggatagtctaagggaggtgttcccatctgagcccagagataagggtgtcttcctagaacattagccgtagtggaattaacaggaaatcatgagggtgacgtagaattgagtcttccaggggactctatcagaactggaccatctccaagtatataacgatgagtcctcttaatgctaggagtagaaaatggtcctaggaaggggactgaggattgcggtggggggtggggtggaaaagaaagtacagaacaaaccctgtgtcactgtcccaagttgctaagtgaacagaactatctcagcatcagaatgagaaagcctgagaagaaagaaccaaccacaagcacacaggaaggaaagcgcaggaggtgaaaatgctttcttggccagggtagtaagaattagaggttaatgcagggactgtaaaaccaccttttctgcttcaatatctaattcctgtgtagctttgttcattgcatttattaaacaaatgttgtataaccaatactaaatgtactactgagcttcgctgagttaagttatgaaactttcaaatccttcatcatgtcagttccaatgaggtggggatggagaagacaattgttgcttatgaaagaaagctttagctgtctctgttttgtaagctttaagcgcaacatttcttggttccaataaagcattttacaagatcttgcatgctactcttagatagaagatgggaaaaccatggtaataaaatatgaatgataaaaaaaaaaaaaaaaaaaaaaaaaaaaaaaaaaaaaaaaaaaaaaaaaaaaaaaaaaaaaaaaaaaaaaaaaaaaaaaaaaaaaaaaaaaaaaaaaaaa

SEQ ID NO: 34 - protein, 254 aa, Homo sapiens [sequence omitted]

SEQ ID NO: 35 - DNA, 820 bp, Homo sapiens
cactccagtgtggcatcatgtggcagctgctcctcccaactgctctgctacttctagtttcagctggcatgcggactgaagatctcccaaaggctgtggtgttcctggagcctcaatggtacagcgtgcttgagaaggacagtgtgactctgaagtgccagggagcctactcccctgaggacaattccacacagtggtttcacaatgagagcctcatctcaagccaggcctcgagctacttcattgacgctgccacagtcaacgacagtggagagtacaggtgccagacaaacctctccaccctcagtgacccggtgcagctagaagtccatatcggctggctgttgctccaggcccctcggtgggtgttcaaggaggaagaccctattcacctgaggtgtcacagctggaagaacactgctctgcataaggtcacatatttacagaatggcaaagacaggaagtattttcatcataattctgacttccacattccaaaagccacactcaaagatagcggctcctacttctgcagggggcttgttgggagtaaaaatgtgtcttcagagactgtgaacatcaccatcactcaaggtttggcagtgtcaaccatctcatcattctctccacctgggtaccaagtctctttctgcttggtgatggtactcctttttgcagtggacacaggactatatttctctgtgaagacaaacatttgaagctcaacaagagactggaaggaccataaacttaaatggagaaaggaccctcaagacaaatgacccccatcccatgggagtaataagagcagtggcagcag

SEQ ID NO: 36 - protein, 233 aa, Homo sapiens
MWQLLLPTALLLLVSAGMRTEDLPKAVVFLEPQWYSVLEKDSVTLKCQGAYSPEDNSTQWFHNESLISSQASSYFIDAATVNDSGEYRCQTNLSTLSDPVQLEVHIGWLLLQAPRWVFKEEDPIHLRCHSWKNTALHKVTYLQNGKDRKYFHHNSDFHIPKATLKDSGSYFCRGLVGSKNVSSETVNITITQGLAVSTISSFSPPGYQVSFCLVMVLLFAVDTGLYFSVKTNI

SEQ ID NO: 37 - protein, 330 aa, Homo sapiens [sequence omitted]

SEQ ID NO: 38 - protein, 326 aa, Homo sapiens; identical to SEQ ID NO: 24

SEQ ID NO: 39 - protein, 327 aa, Homo sapiens; identical to SEQ ID NO: 26

SEQ ID NO: 40 - protein, 115 aa, Artificial
  An artificially generated sequence
QVQLVQSGAEVKKPGASVKVSCKASGYTFTDYEMHWIRQPPGQGLEWIGAIDPKTGDTAYSQKFKGRVTLTADKSTSTAYMELSSLTSEDTAVYYCTRFYSYTYWGQGTLVTVSS

SEQ ID NO: 41 - protein, 112 aa, Artificial
  An artificially generated sequence
DIVMTQSPLSLPVTPGEPASISCRSSQSLVHSNRNTYLHWYQQKPGQAPRLLIYKVSNRFSGVPDRFSGSGSGTDFTLKISRVEAEDVGVYYCSQNTHVPPTFGQGTKLEIK

SEQ ID NO: 42 - protein, 122 aa, Rattus norvegicus
EVQLVETGGSLVQPGKSLKLTCATSGFTFSNAWMHWVRQSPEKQLEWVAQIKAKSNNYATYYAESVKGRFTISRDDSKSNIYLQMNSLKEEDTAVYYCRYVHYGAYYGVDAWGQGTSVTVSS

SEQ ID NO: 43 - protein, 112 aa, Rattus norvegicus
DVVMTQTPVSMSVSLGGQVSISCRSSQSLVHNNGNTYVSWYIQKPSQSPQLLIYKVSNRFSGISDRFSGSGSGTDFTLKISRVEPDDLGVYYCGQGTQDPYTFGAGTKLELK

SEQ ID NO: 44 - protein, 328 aa, Artificial
  An artificially generated sequence
ASTKGPSVFPLAPSSKSTSGGTAALGCLVKDYFPEPVTVSWNSGALTSGVHTFPAVLQSSGLYSLSSVVTVPSSSLGTQTYICNVNHKPSNTKVDKKVEPKSCDKTHTCPPCPAPELLGGPSVFLFPPKPKDTLMISRTPEVTCVVVDVSHEDPEVKFNWYVDGVEVHNAKTKPREEQYNSTYRVVSVLTVLHQDWLNGKEYKCKVSNKALPAPIEKTISKAKGQPREPQVYTLPPSRCELTKNQVSLSCAVKGFYPSDIAVEWESNGQPENNYKTTPPVLDSDGSFFLVSKLTVDKSRWQQGNVFSCSVMHEALHNHYTQKSLSLSP

SEQ ID NO: 45 - protein, 338 aa, Artificial
  An artificially generated sequence
SSASTKGPSVFPLAPSSKSTSGGTAALGCLVKDYFPEPVTVSWNSGALTSGVHTFPAVLQSSGLYSLSSVVTVPSSSLGTQTYICNVNHKPSNTKVDKKVEPKSCDKTHTCPPCPAPEAAGGPSVFLFPPKPKDTLMISRTPEVTCVVVDVSHEDPEVKFNWYVDGVEVHNAKTKPREEQYASTYRVVSVLTVLHQDWLNGKEYKCKVSNKALPAPIEKTISKAKGQPREPQVCTLPPSRDELTKNQVSLWCLVKGFYPSDIAVEWESNGQPENNYKTTPPVLDSDGSFFLYSKLTVDKSRWQQGNVFSCSVMHEALHNHYTQKSLSLSPHHHHHHHH

SEQ ID NO: 46 - protein, 336 aa, Artificial
  An artificially generated sequence
ASTKGPSVFPLAPSSKSTSGGTAALGCLVKDYFPEPVTVSWNSGALTSGVHTFPAVLQSSGLYSLSSVVTVPSSSLGTQTYICNVNHKPSNTKVDKKVEPKSCDKTHTCPPCPAPEAAGGPSVFLFPPKPKDTLMISRTPEVTCVVVDVSHEDPEVKFNWYVDGVEVHNAKTKPREEQYASTYRVVSVLTVLHQDWLNGKEYKCKVSNKALPAPIEKTISKAKGQPREPQVYTLPPSRCELTKNQVSLSCAVKGFYPSDIAVEWESNGQPENNYKTTPPVLDSDGSFFLVSKLTVDKSRWQQGNVFSCSVMHEALHNHYTQKSLSLSPDYKDDDDK

SEQ ID NO: 47 - protein, 450 aa, Artificial
  An artificially generated sequence
DIVMTQSPLSLPVTPGEPASISCRSSQSLVHSNRNTYLHWYQQKPGQAPRLLIYKVSNRFSGVPDRFSGSGSGTDFTLKISRVEAEDVGVYYCSQNTHVPPTFGQGTKLEIKSSASTKGPSVFPLAPSSKSTSGGTAALGCLVKDYFPEPVTVSWNSGALTSGVHTFPAVLQSSGLYSLSSVVTVPSSSLGTQTYICNVNHKPSNTKVDKKVEPKSCDKTHTCPPCPAPEAAGGPSVFLFPPKPKDTLMISRTPEVTCVVVDVSHEDPEVKFNWYVDGVEVHNAKTKPREEQYASTYRVVSVLTVLHQDWLNGKEYKCKVSNKALPAPIEKTISKAKGQPREPQVCTLPPSRDELTKNQVSLWCLVKGFYPSDIAVEWESNGQPENNYKTTPPVLDSDGSFFLYSKLTVDKSRWQQGNVFSCSVMHEALHNHYTQKSLSLSPHHHHHHHH

SEQ ID NO: 48 - protein, 222 aa, Artificial
  An artificially generated sequence
QVQLVQSGAEVKKPGASVKVSCKASGYTFTDYEMHWIRQPPGQGLEWIGAIDPKTGDTAYSQKFKGRVTLTADKSTSTAYMELSSLTSEDTAVYYCTRFYSYTYWGQGTLVTVSSASVAAPSVFIFPPSDEQLKSGTASVVCLLNNFYPREAKVQWKVDNALQSGNSQESVTEQDSKDSTYSLSSTLTLSKADYEKHKVYACEVTHQGLSSPVTKSFNRGEC

SEQ ID NO: 49 - protein, 458 aa, Artificial
  An artificially generated sequence
EVQLVETGGSLVQPGKSLKLTCATSGFTFSNAWMHWVRQSPEKQLEWVAQIKAKSNNYATYYAESVKGRFTISRDDSKSNIYLQMNSLKEEDTAVYYCRYVHYGAYYGVDAWGQGTSVTVSSASTKGPSVFPLAPSSKSTSGGTAALGCLVKDYFPEPVTVSWNSGALTSGVHTFPAVLQSSGLYSLSSVVTVPSSSLGTQTYICNVNHKPSNTKVDKKVEPKSCDKTHTCPPCPAPEAAGGPSVFLFPPKPKDTLMISRTPEVTCVVVDVSHEDPEVKFNWYVDGVEVHNAKTKPREEQYASTYRVVSVLTVLHQDWLNGKEYKCKVSNKALPAPIEKTISKAKGQPREPQVYTLPPSRCELTKNQVSLSCAVKGFYPSDIAVEWESNGQPENNYKTTPPVLDSDGSFFLVSKLTVDKSRWQQGNVFSCSVMHEALHNHYTQKSLSLSPDYKDDDDK

SEQ ID NO: 50 - protein, 219 aa, Artificial
  An artificially generated sequence
DVVMTQTPVSMSVSLGGQVSISCRSSQSLVHNNGNTYVSWYIQKPSQSPQLLIYKVSNRFSGISDRFSGSGSGTDFTLKISRVEPDDLGVYYCGQGTQDPYTFGAGTKLELKRTVAAPSVFIFPPSDEQLKSGTASVVCLLNNFYPREAKVQWKVDNALQSGNSQESVTEQDSKDSTYSLSSTLTLSKADYEKHKVYACEVTHQGLSSPVTKSFNRGEC

SEQ ID NO: 51 - protein, 122 aa, Artificial
  An artificially generated sequence
QVQLVESGGGVVQPGRSLRLSCAASGFTFSNAWMHWVRQAPGKGLEWVAQIKAKSNNYATYYAESVKGRFTISRDDSKNSLYLQMNSLKTEDTAVYYCARVHYGAYYGVDAWGQGTTVTVSS

SEQ ID NO: 52 - protein, 122 aa, Artificial
  An artificially generated sequence
QVQLVESGGGVVQPGRSLRLSCAASGFTFSNAWMHWVRQAPGKGLEWVAQIKAKSNNYATYYAESVKGRFTISRDDSKNSLYLQMNSLKTEDTAVYYCRYVHYGAYYGVDAWGQGTTVTVSS

SEQ ID NO: 53 - protein, 112 aa, Artificial
  An artificially generated sequence
DIVMTQSPLSLPVTPGEPASISCRSSQSLVHSNRNTYLHWYQQKPGQAPRLLIYKVSNRFSGVPDRFSGSGSGTDFTLKISRVEAEDVGVYYCGQGTQVPYTFGQGTKLEIK

SEQ ID NO: 54 - protein, 448 aa, Artificial
  An artificially generated sequence
QVQLVQSGAEVKKPGASVKVSCKASGYTFTDYEMHWIRQPPGQGLEWIGAIDPKTGDTAYSQKFKGRVTLTADKSTSTAYMELSSLTSEDTAVYYCTRFYSYTYWGQGTLVTVSSASTKGPSVFPLAPCSRSTSESTAALGCLVKDYFPEPVTVSWNSGALTSGVHTFPAVLQSSGLYSLSSVVTVPSSSLGTKTYTCNVDHKPSNTKVDKRVESKYGPPCPPCPAPEFRGGPKVFLFPPKPKDTLMISRTPEVTCVVVDVSQEDPEVQFNWYVDGVEVHNAKTKPREEQFASTYRVVSVLTVLHQDWLNGKEYKCKVSNKGLPSSIEKTISKAKGQPREPQVYTLPPSQKEMTKNQVSLTCLVKGFYPSDIAVEWESNGQPENNYKTTPPVLDSDGSFFLYSRLTVDKSRWQEGNVFSCSVMHEALHNRYTQKSLSLSLHHHHHHHH

SEQ ID NO: 55 - protein, 455 aa, Artificial
  An artificially generated sequence
QVQLVESGGGVVQPGRSLRLSCAASGFTFSNAWMHWVRQAPGKGLEWVAQIKAKSNNYATYYAESVKGRFTISRDDSKNSLYLQMNSLKTEDTAVYYCRYVHYGAYYGVDAWGQGTTVTVSSASTKGPSVFPLAPCSRSTSESTAALGCLVKDYFPEPVTVSWNSGALTSGVHTFPAVLQSSGLYSLSSVVTVPSSSLGTKTYTCNVDHKPSNTKVDKRVESKYGPPCPPCPAPEFRGGPKVFLFPPKPKDTLMISRTPEVTCVVVDVSQEDPEVQFNWYVDGVEVHNAKTKPREEQFASTYRVVSVLTVLHQDWLNGKEYKCKVSNKGLPSSIEKTISKAKGQPREPQVYTLPPSQEEMTKNQVSLTCLVKGFYPSDIAVEWESNGQPENNYKTTPPVLDSDGSFFLYSRLTVDKSRWQEGNVFSCSVMHEALHNHYTQESLSLSLDYKDDDDK

SEQ ID NO: 56 - protein, 219 aa, Artificial
  An artificially generated sequence
DIVMTQSPLSLPVTPGEPASISCRSSQSLVHSNRNTYLHWYQQKPGQAPRLLIYKVSNRFSGVPDRFSGSGSGTDFTLKISRVEAEDVGVYYCGQGTQVPYTFGQGTKLEIKRTVAAPSVFIFPPSDEQLKSGTASVVCLLNNFYPREAKVQWKVDNALQSGNSQESVTEQDSKDSTYSLSSTLTLSKADYEKHKVYACEVTHQGLSSPVTKSFNRGEC

SEQ ID NO: 57 - protein, 336 aa, Artificial; identical to SEQ ID NO: 46
  An artificially generated sequence

SEQ ID NO: 58 - protein, 338 aa, Artificial; identical to SEQ ID NO: 45
  An artificially generated sequence

SEQ ID NO: 59 - protein, 230 aa, Artificial
  An artificially generated sequence
EPKSSDKTHTCPPCPAPELLGGPSVFLFPPKPKDTLMISRTPEVTCVVVDVSHEDPEVKFNWYVDGVEVHNAKTKPREEQYNSTYRVVSVLTVLHQDWLNGKEYKCKVSNKALPAPIEKTISKAKGQPREPQVCTLPPSRDELTKNQVSLWCLVKGFYPSDIAVEWESNGQPENNYKTTPPVLDSDGSFFLYSKLTVDKSRWQQGNVFSCSVMHEALHNRYTQKSLSLSP

SEQ ID NO: 60 - protein, 325 aa, Artificial
  An artificially generated sequence
ASTKGPSVFPLAPCSRSTSESTAALGCLVKDYFPEPVTVSWNSGALTSGVHTFPAVLQSSGLYSLSSVVTVPSSSLGTKTYTCNVDHKPSNTKVDKRVESKYGPPCPPCPAPEFRGGPKVFLFPPKPKDTLMISRTPEVTCVVVDVSQEDPEVQFNWYVDGVEVHNAKTKPREEQFASTYRVVSVLTVLHQDWLNGKEYKCKVSNKGLPSSIEKTISKAKGQPREPQVYTLPPSQKEMTKNQVSLTCLVKGFYPSDIAVEWESNGQPENNYKTTPPVLDSDGSFFLYSKLTVDKSRWQEGNVFSCSVMHEALHNRYTQKSLSLSP

SEQ ID NO: 61 - protein, 325 aa, Artificial
  An artificially generated sequence
ASTKGPSVFPLAPCSRSTSESTAALGCLVKDYFPEPVTVSWNSGALTSGVHTFPAVLQSSGLYSLSSVVTVPSSSLGTQTYTCNVDHKPSNTKVDKRVESKYGPPCPPCPAPEFRGGPKVFLFPPKPKDTLMISRTPEVTCVVVDVSQEDPEVQFNWYVDGVEVHNAKTKPREEQFASTYRVVSVLTVLHQDWLNGKEYKCKVSNKGLPSSIEKTISKAKGQPREPQVYTLPPSQEEMTKNQVSLTCLVKGFYPSDIAVEWESNGQPENNYKTTPPVLDSDGSFFLYSKLTVDKSRWQEGNVFSCSVMHEALHNHYTQESLSLSP

SEQ ID NO: 62 - protein, 325 aa, Artificial
  An artificially generated sequence
ASTKGPSVFPLAPCSRSTSESTAALGCLVKDYFPEPVTVSWNSGALTSGVHTFPAVLQSSGLYSLSSVVTVPSSSLGTKTYTCNVDHKPSNTKVDKRVESKYGPPCPPCPAPEFRGGPKVFLFPPKPKDTLMISRTPEVTCVVVDVSQEDPEVQFNWYVDGVEVHNAKTKPREEQFASTYRVVSVLTVLHQDWLNGKEYKCKVSNKGLPSSIEKTISKAKGQPREPQVYTLPPSQKEMTKNQVSLTCLVKGFYPSDIAVEWESNGQPENNYKTTPPVLDSDGSFFLYSKLTVDKSRWQEGNVFSCSVMHEALHNHYTQKSLSLSP

SEQ ID NO: 63 - protein, 107 aa, Artificial [sequence omitted]

SEQ ID NO: 64 - protein, 122 aa, Artificial
  An artificially generated sequence
QVQLVESGGGLVQPGRSLRLSCAASGFTFSNAWMHWVRQAPGKGLEWVAQIKAKSNNYATYYAESVKGRFTISRADSKNSIYLQMNSLKTEDTAVYYCRYVHYGAYYGVDAWGQGTTVTVSS

SEQ ID NO: 65 - protein, 122 aa, Artificial
  An artificially generated sequence
QVQLVESGGGLVQPGRSLRLSCAASGFTFSNAWMHWVRQAPGKGLEWVAQIKAKSNNYATYYAESVKGRFTISRDDSKNSIYLQMNSLKTEDTAVYYCRYVHYGAYYGVQAWGQGTTVTVSS

SEQ ID NO: 66 - protein, 122 aa, Artificial
  An artificially generated sequence
QVQLVESGGGLVQPGRSLRLSCAASGFTFSNAWMHWVRQAPGKGLEWVAQIKAKSNNYATYYAESVKGRFTISRADSKNSIYLQMNSLKTEDTAVYYCRYVHYGAYYGVQAWGQGTTVTVSS

SEQ ID NO: 67 - protein, 122 aa, Artificial
  An artificially generated sequence
QVQLVESGGGVVQPGRSLRLSCAASGFTFSNAWMHWVRQAPGKGLEWVAQIKAKSNNYATYYAESVKGRFTISRADSKNSLYLQMNSLKTEDTAVYYCRYVHYGAYYGVQAWGQGTTVTVSS

SEQ ID NO: 68 - protein, 122 aa, Artificial
  An artificially generated sequence
QVQLVESGGGVVQPGGSLRLSCAASGFTFSNAWMHWVRQAPGKGLEWVAQIKAKSNNYATYYAESVKGRFTISRDDSKNSLYLQMNSLKTEDTAVYYCRYVHYGAYYGVDAWGQGTTVTVSS

SEQ ID NO: 69 - protein, 122 aa, Artificial
  An artificially generated sequence
QVQLVESGGGLVQPGRSLRLSCAASGFTFSNAWMHWVRQAPGKGLEWVAQIKAKSQNYATYYAESVKGRFTISRADSKNSIYLQMNSLKTEDTAVYYCRYVHYGAYYGVDIWGQGTTVTVSS

SEQ ID NO: 70 - protein, 122 aa, Artificial
  An artificially generated sequence
QVQLVESGGGLVQPGRSLRLSCAASGFTFSNAWMHWVRQAPGKGLEWVAQIKSKSNNYATYYAESVKGRFTISRADSKNSIYLQMNSLKTEDTAVYYCRYVHYGAYYGVDIWGQGTTVTVSS

SEQ ID NO: 71 - protein, 122 aa, Artificial
  An artificially generated sequence
QVQLVESGGGLVQPGRSLRLSCAASGFTFSNAWMHWVRQAPGKGLEWVAQIKGKSNNYATYYAESVKGRFTISRADSKNSIYLQMNSLKTEDTAVYYCRYVHYGAYYGVDIWGQGTTVTVSS

SEQ ID NO: 72 - protein, 122 aa, Artificial
  An artificially generated sequence
QVQLVESGGGLVQPGRSLRLSCAASGFTFSNAWMHWVRQAPGKGLEWVAQIKAKSNNYATYYAPSVKGRFTISRADSKNSIYLQMNSLKTEDTAVYYCRYVHYGAYYGVDIWGQGTTVTVSS

SEQ ID NO: 73 - protein, 122 aa, Artificial
  An artificially generated sequence
QVQLVESGGGLVQPGRSLRLSCAASGFTFSNAWMHWVRQAPGKGLEWVAQIKAKSNNYATYYAESVKGRFTISRADSKNSIYLQMNSLKTEDTAVYYCRYVHYSAYYGVDIWGQGTTVTVSS

SEQ ID NO: 74 - protein, 122 aa, Artificial
  An artificially generated sequence
QVQLVESGGGLVQPGRSLRLSCAASGFTFSNAWMHWVRQAPGKGLEWVAQIKAKSNNYATYYAESVKGRFTISRADSKNSIYLQMNSLKTEDTAVYYCRYVHYGASYGVDIWGQGTTVTVSS

SEQ ID NO: 75 - protein, 122 aa, Artificial
  An artificially generated sequence
QVQLVESGGGLVQPGRSLRLSCAASGFTFSNAWMHWVRQAPGKGLEWVAQIKAKSNNYATYYAESVKGRFTISRADSKNSIYLQMNSLKTEDTAVYYCRYVHYYYSYGVDIWGQGTTVTVSS

SEQ ID NO: 76 - protein, 122 aa, Artificial
  An artificially generated sequence
QVQLVESGGGLVQPGRSLRLSCAASGFTFSNAWMHWVRQAPGKGLEWVAQIKGKSQNYATYYAESVKGRFTISRADSKNSIYLQMNSLKTEDTAVYYCRYVHYGAYYGVDIWGQGTTVTVSS

SEQ ID NO: 77 - protein, 122 aa, Artificial
  An artificially generated sequence
QVQLVESGGGLVQPGRSLRLSCAASGFTFSNAWMHWVRQAPGKGLEWVAQIKGKSNNYATYYAPSVKGRFTISRADSKNSIYLQMNSLKTEDTAVYYCRYVHYGAYYGVDIWGQGTTVTVSS

SEQ ID NO: 78 - protein, 122 aa, Artificial
  An artificially generated sequence
QVQLVESGGGLVQPGRSLRLSCAASGFTFSNAWMHWVRQAPGKGLEWVAQIKGKSNNYATYYAESVKGRFTISRADSKNSIYLQMNSLKTEDTAVYYCRYVHYSASYGVDIWGQGTTVTVSS

SEQ ID NO: 79 - protein, 122 aa, Artificial
  An artificially generated sequence
QVQLVESGGGLVQPGRSLRLSCAASGFTFSNAWMHWVRQAPGKGLEWVAQIKGKSNNYATYYAESVKGRFTISRADSKNSIYLQMNSLKTEDTAVYYCRYVHYSYSYGVDIWGQGTTVTVSS

SEQ ID NO: 80 - protein, 122 aa, Artificial
  An artificially generated sequence
QVQLVESGGGLVQPGGSLRLSCAASGFTFSNAWMHWVRQAPGKGLEWVAQIKAKSNNYATYYAESVKGRFTISRADSKNSIYLQMNSLKTEDTAVYYCRYVHYGAYYGVDIWGQGTTVTVSS

SEQ ID NO: 81 - protein, 122 aa, Artificial
  An artificially generated sequence
QVQLVESGGGLVQPGGSLRLSCAASGFTFSNAWMHWVRQAPGKGLEWVAQIKGKSNNYATYYAESVKGRFTISRADSKNSIYLQMNSLKTEDTAVYYCRYVHYSASYGVDIWGQGTTVTVSS

SEQ ID NO: 82 - protein, 122 aa, Artificial
  An artificially generated sequence
QVQLVESGGGLVQPGRSLRLSCAASGFTFSNAWMHWVRQAPGKGLEWVAQIKGKSQNYATYYAESVKGRFTISRADSKNSIYLQMNSLKTEDTAVYYCRYVHYSASYGVDIWGQGTTVTVSS

SEQ ID NO: 83 - protein, 122 aa, Artificial
  An artificially generated sequence
QVQLVESGGGLVQPGRSLRLSCAASGFTFSNAWMHWVRQAPGKGLEWVAQIKGKSNNYATYYAPSVKGRFTISRADSKNSIYLQMNSLKTEDTAVYYCRYVHYSASYGVDIWGQGTTVTVSS

SEQ ID NO: 84 - protein, 122 aa, Artificial
  An artificially generated sequence
QVQLVESGGGLVQPGRSLRLSCAASGFTFSNAWMHWVRQAPGKGLEWVAQIKGKSNNYATYYAESVKGRFTISRADSKNSIYLQMNSLKTEDTAVYYCRYVHYSASYGVDAWGQGTTVTVSS

SEQ ID NO: 85 - protein, 122 aa, Artificial
  An artificially generated sequence
QVQLVESGGGLVQPGGSLRLSCAASGFTFSNAWMHWVRQAPGKGLEWVAQIKGKSQNYATYYAPSVKGRFTISRADSKNSIYLQMNSLKTEDTAVYYCRYVHYSASYGVDIWGQGTTVTVSS

SEQ ID NO: 86 - protein, 122 aa, Artificial
  An artificially generated sequence
QVQLVESGGGLVQPGGSLRLSCAASGFTFSNAWMHWVRQAPGKGLEWVAQIKGKSQNYATYYAESVKGRFTISRADSKNSIYLQMNSLKTEDTAVYYCRYVHYSASYGVDIWGQGTTVTVSS

SEQ ID NO: 87 - protein, 122 aa, Artificial
  An artificially generated sequence
QVQLVESGGGLVQPGGSLRLSCAASGFTFSNAWMHWVRQAPGKGLEWVAQIKGKSQNYATYYAESVKGRFTISRADSKNSIYLQMNSLKTEDTAVYYCRYVHYSASYGVDAWGQGTTVTVSS

SEQ ID NO: 88 - protein, 122 aa, Artificial
  An artificially generated sequence
QVQLVESGGGLVQPGRSLRLSCAASGFTFSNAWMHWVRQAPGKGLEWVAQIKSKSQNYATYYAESVKGRFTISRADSKNSIYLQMNSLKTEDTAVYYCRYVHYSASYGVDIWGQGTTVTVSS

SEQ ID NO: 89 - protein, 122 aa, Artificial
  An artificially generated sequence
QVQLVESGGGLVQPGGSLRLSCAASGFTFSNAWMHWVRQAPGKGLEWVAQIKSKSQNYATYYAESVKGRFTISRADSKNSIYLQMNSLKTEDTAVYYCRYVHYSASYGVDIWGQGTTVTVSS

SEQ ID NO: 90 - protein, 122 aa, Artificial
  An artificially generated sequence
QVQLVESGGGLVQPGGSLRLSCAASGFTFSNAWMHWVRQAPGKGLEWVAQIKSKSQNYATYYAESVKGRFTISRADSKNSIYLQMNSLKTEDTAVYYCRYVHYSASYGVDAWGQGTTVTVSS

SEQ ID NO: 91 - protein, 122 aa, Artificial
  An artificially generated sequence
QVQLVESGGGVVQPGGSLRLSCAASGFTFSNAWMHWVRQAPGKGLEWVAQIKSKSQNYATYYAESVKGRFTISRADSKNSIYLQMNSLKTEDTAVYYCRYVHYSASYGVDIWGQGTTVTVSS

SEQ ID NO: 92 - protein, 122 aa, Artificial
  An artificially generated sequence
QVQLVESGGGLVQPGRSLRLSCSASGFTFSNAWMHWVRQAPGKGLEWVAQIKGKSNNYATYYAESVKGRFTISRADSKNSIYLQMNSLKTEDTAVYYCRYVHYSASYGVDIWGQGTTVTVSS

SEQ ID NO: 93 - protein, 122 aa, Artificial
  An artificially generated sequence
QVQLVESGGGVVQPGRSLRLSCAASGFTFSNAWMHWVRQAPGKGLEWVAQIKGKSNNYATYYAESVKGRFTISRADSKNSIYLQMNSLKTEDTAVYYCRYVHYSASYGVDIWGQGTTVTVSS

SEQ ID NO: 94 - protein, 122 aa, Artificial
  An artificially generated sequence
QVQLVESGGGVVQPGGSLRLSCAASGFTFSNAWMHWVRQAPGKGLEWVAQIKGKSNNYATYYAESVKGRFTISRADSKNSIYLQMNSLKTEDTAVYYCRYVHYSASYGVDIWGQGTTVTVSS

SEQ ID NO: 95 - protein, 122 aa, Artificial
  An artificially generated sequence
QVQLVESGGGLVQPGRSLRLSCAASGFTFSNAWMHWVRQAPGKGLEWVAQIKSKSQNYATYYAESVKGRFTISRADSKNSIYLQMNSLKTEDTAVYYCRYVHYSASYGVDAWGQGTTVTVSS

SEQ ID NO: 96 - protein, 122 aa, Artificial
  An artificially generated sequence
QVQLVESGGGLVQPGRSLRLSCAASGFTFSNAWMHWVRQAPGKGLEWVAQIKSKSQNYATYYAESVKGRFTISRADSKNSIYLQMNSLKTEDTAVYYCRYVHYSASYGVDYWGQGTTVTVSS

SEQ ID NO: 97 - protein, 122 aa, Artificial
  An artificially generated sequence
QVQLVESGGGLVQPGRSLRLSCAASGFTFSNAWMHWVRQAPGKGLEWVAQIKGKSQNYATYYAESVKGRFTISRADSKNSIYLQMNSLKTEDTAVYYCRYVHYSASYGVDAWGQGTTVTVSS

SEQ ID NO: 98 - protein, 122 aa, Artificial
  An artificially generated sequence
QVQLVESGGGLVQPGRSLRLSCAASGFTFSNAWMHWVRQAPGKGLEWVAQIKGKSQNYATYYAESVKGRFTISRADSKNSIYLQMNSLKTEDTAVYYCRYVHYSASYGVDYWGQGTTVTVSS

SEQ ID NO: 99 - protein, 122 aa, Artificial
  An artificially generated sequence
QVQLVESGGGLVQPGRSLRLSCAASGFTFSNAWMHWVRQAPGKGLEWVAQIKGKSNNYATYYAESVKGRFTISRADSKNSIYLQMNSLKTEDTAVYYCRYVHYSASYGVDYWGQGTTVTVSS

SEQ ID NO: 100 - protein, 122 aa, Artificial
  An artificially generated sequence
QVQLVESGGGLVQPGRSLRLSCAASGFTFSNAWMPWVRQAPGKGLEWVAQIKGKSNNYATYYAESVKGRFTISRADSKNSIYLQMNSLKTEDTAVYYCRYVHYSASYGVDIWGQGTTVTVSS

SEQ ID NO: 101 - protein, 122 aa, Artificial
  An artificially generated sequence
QVQLVESGGGLVQPGRSLRLSCAASGFTFSNAWMHWVRQAPGKGLEWVAQIKDKSNNYATYYAESVKGRFTISRADSKNSIYLQMNSLKTEDTAVYYCRYVHYSASYGVDIWGQGTTVTVSS

SEQ ID NO: 102 - protein, 122 aa, Artificial
  An artificially generated sequence
QVQLVESGGGLVQPGRSLRLSCAASGFTFSNAWMHWVRQAPGKGLEWVAQIKDKSQNYATYYAESVKGRFTISRADSKNSIYLQMNSLKTEDTAVYYCRYVHYSASYGVDIWGQGTTVTVSS

SEQ ID NO: 103 - protein, 122 aa, Artificial
  An artificially generated sequence
QVQLVESGGGLVQPGRSLRLSCAASGFTFSNAWMHWVRQAPGKGLEWVAQIKDKSQNYATYYAESVKGRFTISRADSKNSIYLQMNSLKTEDTAVYYCRYVHYSASYGVDAWGQGTTVTVSS

SEQ ID NO: 104 - protein, 122 aa, Artificial
  An artificially generated sequence
QVQLVESGGGLVQPGRSLRLSCAASGFTFSNAWMHWVRQAPGKGLEWVAQIKDKSQNYATYYAESVKGRFTISRADSKNSIYLQMNSLKTEDTAVYYCRYVHYSASYGVDYWGQGTTVTVSS

SEQ ID NO: 105 - protein, 122 aa, Artificial
  An artificially generated sequence
QVQLVESGGGVVQPGGSLRLSCAASGFTFSNAWMHWVRQAPGKGLEWVAQIKDKSQNYATYYAESVKGRFTISRADSKNSIYLQMNSLKTEDTAVYYCRYVHYSASYGVDAWGQGTTVTVSS

SEQ ID NO: 106 - protein, 122 aa, Artificial
  An artificially generated sequence
QVQLVESGGGLVQPGRSLRLSCSASGFTFSNAWMHWVRQAPGKGLEWVAQIKDKSNNYATYYAESVKGRFTISRADSKNSIYLQMNSLKTEDTAVYYCRYVHYSASYGVDIWGQGTTVTVSS

SEQ ID NO: 107 - protein, 122 aa, Artificial
  An artificially generated sequence
QVQLVESGGGLVQPGRSLRLSCSASGFTFSNAWMHWVRQAPGKGLEWVAQIKDKSQNYATYYAESVKGRFTISRADSKNSIYLQMNSLKTEDTAVYYCRYVHYSASYGVDIWGQGTTVTVSS

SEQ ID NO: 108 - protein, 122 aa, Artificial
  An artificially generated sequence
QVQLVESGGGLVQPGRSLRLSCSASGFTFSNAWMHWVRQAPGKGLEWVAQIKDKSQNYATYYAESVKGRFTISRADSKNSIYLQMNSLKTEDTAVYYCRYVHYSASYGVDAWGQGTTVTVSS

SEQ ID NO: 109 - protein, 122 aa, Artificial
  An artificially generated sequence
QVQLVESGGGLVQPGRSLRLSCSASGFTFSNAWMHWVRQAPGKGLEWVAQIKDKSQNYATYYAESVKGRFTISRADSKNSIYLQMNSLKTEDTAVYYCRYVHYSASYGVDYWGQGTTVTVSS

SEQ ID NO: 110 - protein, 122 aa, Artificial
  An artificially generated sequence
QVQLVESGGGLVQPGRSLRLSCAASGFTFSNAWMHWVRQAPGKGLEWVAQIKDKSNNYATYYAESVKGRFTISRDDSKNSIYLQMNSLKTEDTAVYYCRYVHYSASYGVDIWGQGTTVTVSS

SEQ ID NO: 111 - protein, 122 aa, Artificial
  An artificially generated sequence
QVQLVESGGGLVQPGRSLRLSCAASGFTFSNAWMHWVRQAPGKGLEWVAQIKDKSQNYATYYAESVKGRFTISRDDSKNSIYLQMNSLKTEDTAVYYCRYVHYSASYGVDIWGQGTTVTVSS

SEQ ID NO: 112 - protein, 122 aa, Artificial
  An artificially generated sequence
QVQLVESGGGLVQPGRSLRLSCAASGFTFSNAWMHWVRQAPGKGLEWVAQIKDKSQNYATYYAESVKGRFTISRDDSKNSIYLQMNSLKTEDTAVYYCRYVHYSASYGVDAWGQGTTVTVSS

SEQ ID NO: 113 - protein, 122 aa, Artificial
  An artificially generated sequence
QVQLVESGGGLVQPGRSLRLSCAASGFTFSNAWMHWVRQAPGKGLEWVAQIKDKSQNYATYYAESVKGRFTISRDDSKNSIYLQMNSLKTEDTAVYYCRYVHYSASYGVDYWGQGTTVTVSS

SEQ ID NO: 114 - protein, 122 aa, Artificial
  An artificially generated sequence
QVQLVESGGGLVQPGRSLRLSCAASGFTFSNAWMHWVRQAPGKGLEWVAQIKDKSNNYATYYAESVKGRFTISRADSKNSLYLQMNSLKTEDTAVYYCRYVHYSASYGVDIWGQGTTVTVSS

SEQ ID NO: 115 - protein, 122 aa, Artificial
  An artificially generated sequence
QVQLVESGGGLVQPGRSLRLSCAASGFTFSNAWMHWVRQAPGKGLEWVAQIKDKSQNYATYYAESVKGRFTISRADSKNSLYLQMNSLKTEDTAVYYCRYVHYSASYGVDIWGQGTTVTVSS

SEQ ID NO: 116 - protein, 122 aa, Artificial
  An artificially generated sequence
QVQLVESGGGLVQPGRSLRLSCAASGFTFSNAWMHWVRQAPGKGLEWVAQIKDKSQNYATYYAESVKGRFTISRADSKNSLYLQMNSLKTEDTAVYYCRYVHYSASYGVDAWGQGTTVTVSS

SEQ ID NO: 117 - protein, 122 aa, Artificial
  An artificially generated sequence
QVQLVESGGGLVQPGRSLRLSCAASGFTFSNAWMHWVRQAPGKGLEWVAQIKDKSQNYATYYAESVKGRFTISRADSKNSLYLQMNSLKTEDTAVYYCRYVHYSASYGVDYWGQGTTVTVSS

SEQ ID NO: 118 - protein, 122 aa, Artificial
  An artificially generated sequence
QVQLVESGGGLVQPGRSLRLSCAASGFTFSNAWMHWVRQAPGKGLEWVAQIKDKSNNYATYYAESVKGRFTISRDDSKNSLYLQMNSLKTEDTAVYYCRYVHYSASYGVDIWGQGTTVTVSS

SEQ ID NO: 119 - protein, 122 aa, Artificial
  An artificially generated sequence
QVQLVESGGGLVQPGRSLRLSCAASGFTFSNAWMHWVRQAPGKGLEWVAQIKDKSQNYATYYAESVKGRFTISRDDSKNSLYLQMNSLKTEDTAVYYCRYVHYSASYGVDIWGQGTTVTVSS

SEQ ID NO: 120 - protein, 122 aa, Artificial
  An artificially generated sequence
QVQLVESGGGLVQPGRSLRLSCAASGFTFSNAWMHWVRQAPGKGLEWVAQIKDKSQNYATYYAESVKGRFTISRDDSKNSLYLQMNSLKTEDTAVYYCRYVHYSASYGVDAWGQGTTVTVSS

SEQ ID NO: 121 - protein, 122 aa, Artificial
  An artificially generated sequence
QVQLVESGGGLVQPGRSLRLSCAASGFTFSNAWMHWVRQAPGKGLEWVAQIKDKSQNYATYYAESVKGRFTISRDDSKNSLYLQMNSLKTEDTAVYYCRYVHYSASYGVDYWGQGTTVTVSS

SEQ ID NO: 122 - protein, 122 aa, Artificial
  An artificially generated sequence
QVQLVESGGGLVQPGRSLRLSCAASGFTFSNAWMHWVRQAPGKGLEWVAQIKDKSQNYATYYAESVKGRFTISRADSKNSIYLQMNSLKTEDTAVYYCRYVHYAASYGVDIWGQGTTVTVSS

SEQ ID NO: 123 - protein, 122 aa, Artificial
  An artificially generated sequence
QVQLVESGGGLVQPGRSLRLSCAASGFTFSNAWMHWVRQAPGKGLEWVAQIKDKSQNYATYYAESVKGRFTISRADSKNSIYLQMNSLKTEDTAVYYCRYVHYAASYGVDAWGQGTTVTVSS

SEQ ID NO: 124 - protein, 122 aa, Artificial
  An artificially generated sequence
QVQLVESGGGVVQPGGSLRLSCAASGFTFSNAWMHWVRQAPGKGLEWVAQIKDKSQNYATYYAESVKGRFTISRADSKNSIYLQMNSLKTEDTAVYYCRYVHYAASYGVDAWGQGTTVTVSS

SEQ ID NO: 125 - protein, 122 aa, Artificial
  An artificially generated sequence
QVQLVESGGGLVQPGRSLRLSCSASGFTFSNAWMHWVRQAPGKGLEWVAQIKDKSQNYATYYAESVKGRFTISRADSKNSIYLQMNSLKTEDTAVYYCRYVHYAASYGVDAWGQGTTVTVSS

SEQ ID NO: 126 - protein, 122 aa, Artificial
  An artificially generated sequence
QVQLVESGGGLVQPGRSLRLSCAASGFTFSNAWMHWVRQAPGKGLEWVAQIKDKSQNYATYYAESVKGRFTISRDDSKNSIYLQMNSLKTEDTAVYYCRYVHYAASYGVDAWGQGTTVTVSS

SEQ ID NO: 127 - protein, 122 aa, Artificial
  An artificially generated sequence
QVQLVESGGGLVQPGRSLRLSCAASGFTFSNAWMHWVRQAPGKGLEWVAQIKDKSQNYATYYAESVKGRFTISRADSKNSLYLQMNSLKTEDTAVYYCRYVHYAASYGVDAWGQGTTVTVSS

SEQ ID NO: 128 - protein, 122 aa, Artificial
  An artificially generated sequence
QVQLVESGGGLVQPGRSLRLSCAASGFTFSNAWMHWVRQAPGKGLEWVAQIKDKSQNYATYYAESVKGRFTISRDDSKNSLYLQMNSLKTEDTAVYYCRYVHYAASYGVDAWGQGTTVTVSS

SEQ ID NO: 129 - protein, 122 aa, Artificial
  An artificially generated sequence
QVQLVESGGGVVQPGGSLRLSCAASGFTFSNAWMHWVRQAPGKGLEWVAQIKDKSQNYATYYAESVKGRFTISRDDSKNSLYLQMNSLKTEDTAVYYCRYVHYAASYGVDAWGQGTTVTVSS

SEQ ID NO: 130 - protein, 122 aa, Artificial
  An artificially generated sequence
QVQLVESGGGVVQPGGSLRLSCAASGFTFSNAWMHWVRQAPGKGLEWVAQIKDKSQNYATYYAESVKGRFTISRDDSKNSLYLQMNSLKTEDTAVYYCRYVHYAASYGVDIWGQGTTVTVSS

SEQ ID NO: 131 - protein, 122 aa, Artificial
  An artificially generated sequence
QVQLVESGGGVVQPGGSLRLSCAASGFTFSNAWMHWVRQAPGKGLEWVAQIKDKSQNYATYYAESVKGRFTISRDDSKNSLYLQMNSLKTEDTAVYYCRYVHYAASYGVDYWGQGTTVTVSS

SEQ ID NO: 132 - protein, 122 aa, Artificial
  An artificially generated sequence
QVQLVESGGGLVQPGRSLRLSCAASGFTFSNAWMHWVRQAPGKGLEWVAQIKDKSNNYATYYAESVKGRFTISRADSKNSIYLQMNSLKTEDTAVYYCRYVHYAASYGVDIWGQGTTVTVSS

SEQ ID NO: 133 - protein, 122 aa, Artificial; identical to SEQ ID NO: 122
  An artificially generated sequence

SEQ ID NO: 134 - protein, 122 aa, Artificial
  An artificially generated sequence
QVQLVESGGGLVQPGRSLRLSCAASGFTFSNAWMHWVRQAPGKGLEWVAQIKDKSQNYATYYAESVKGRFTISRDDSKNSLYLQMNSLKTEDTAVYYCRYVHYAASYGVDIWGQGTTVTVSS

SEQ ID NO: 135 - protein, 122 aa, Artificial
  An artificially generated sequence
QVQLVESGGGVVQPGGSLRLSCAASGFTFSNAWMHWVRQAPGKGLEWVAQIKDKSQNYATYYAESVKGRFTISRADSKNSIYLQMNSLKTEDTAVYYCRYVHYAASYGVDIWGQGTTVTVSS

SEQ ID NO: 136 - protein, 122 aa, Artificial
  An artificially generated sequence
QVQLVESGGGLVQPGRSLRLSCAASGFTFSNAWMHWVRQAPGKGLEWVAQIKDKSQNYATYYAESVKGRFTISRDDSKNSLYLQMNSLKTEDTAVYYCRYVHYAASYGVDYWGQGTTVTVSS

SEQ ID NO: 137 - protein, 122 aa, Artificial
  An artificially generated sequence
QVQLVESGGGVVQPGGSLRLSCAASGFTFSNAWMHWVRQAPGKGLEWVAQIKDKSQNYATYYAESVKGRFTISRADSKNSIYLQMNSLKTEDTAVYYCRYVHYAASYGVDYWGQGTTVTVSS

SEQ ID NO: 138 - protein, 124 aa, Artificial
  An artificially generated sequence
QVQLVESGGGLVQPGRSLRLSCAASGFTFSNAWMHWVRQAPGKGLEWVAQIKDKSNNYATYYAESVKGRFTISRADSKNSIYLQMNSLKTEDTAVYYCRYVHYAAAEMVRDDIWGQGTTVTVSS

SEQ ID NO: 139 - protein, 128 aa, Artificial
  An artificially generated sequence
QVQLVESGGGLVQPGRSLRLSCAASGFTFSNAWMHWVRQAPGKGLEWVAQIKDKSNNYATYYAESVKGRFTISRADSKNSIYLQMNSLKTEDTAVYYCRYVHYAAAEMVRDSYGVDIWGQGTTVTVSS

SEQ ID NO: 140 - protein, 128 aa, Artificial
  An artificially generated sequence
QVQLVESGGGLVQPGRSLRLSCAASGFTFSNAWMHWVRQAPGKGLEWVAQIKDKSNNYATYYAESVKGRFTISRADSKNSIYLQMNSLKTEDTAVYYCRYVHYAAVRRRLSSYGVDIWGQGTTVTVSS

SEQ ID NO: 141 - protein, 122 aa, Artificial
  An artificially generated sequence
QVQLVESGGGLVQPGRSLRLSCAASGFTFSNAWMHWVRQAPGKGLEWVAQIKDKSQNYATYYAESVKGRFTISRADSKNSIYLQMNSLKTEDTAVYYCRYVHYAAGYGVDIWGQGTTVTVSS

SEQ ID NO: 142 - protein, 122 aa, Artificial
  An artificially generated sequence
QVQLVESGGGLVQPGRSLRLSCAASGFTFSNAWMHWVRQAPGKGLEWVAQIKDKSQNYATYYAESVKGRFTISRDDSKNSLYLQMNSLKTEDTAVYYCRYVHYAAGYGVDAWGQGTTVTVSS

SEQ ID NO: 143 - protein, 122 aa, Artificial
  An artificially generated sequence
QVQLVESGGGLVQPGRSLRLSCAASGFTFSNAWMHWVRQAPGKGLEWVAQIKDKSNNYATYYAESVKGRFTISRADSKNSIYLQMNSLKTEDTAVYYCRYVHYAAGYGVDIWGQGTTVTVSS

SEQ ID NO: 144 - protein, 122 aa, Artificial
  An artificially generated sequence
QVQLVESGGGVVQPGGSLRLSCAASGFTFSNAWMHWVRQAPGKGLEWVAQIKDKSQNYATYYAESVKGRFTISRADSKNSIYLQMNSLKTEDTAVYYCRYVHYAAGYGVDIWGQGTTVTVSS

SEQ ID NO: 145 - protein, 122 aa, Artificial
  An artificially generated sequence
QVQLVESGGGLVQPGGSLRLSCAASGFTFSNAWMHWVRQAPGKGLEWVAQIKDKSQNYATYYAESVKGRFTISRDDSKNSLYLQMNSLKTEDTAVYYCRYVHYAAGYGVDAWGQGTTVTVSS

SEQ ID NO: 146 - protein, 122 aa, Artificial
  An artificially generated sequence
QVQLVESGGGLVQPGRSLKLSCAASGFTFSNAWMHWVRQAPGKGLEWVAQIKDKSQNYATYYAESVKGRFTISRDDSKNSLYLQMNSLKTEDTAVYYCRYVHYAAGYGVDAWGQGTTVTVSS

SEQ ID NO: 147 - protein, 122 aa, Artificial
  An artificially generated sequence
QVQLVESGGGLVQPGRSLRLSCAASGFTFSNAWMHWVRQAPGKGLEWVAQIKDKSQNYATYYAESVAGRFTISRDDSKNSLYLQMNSLKTEDTAVYYCRYVHYAAGYGVDAWGQGTTVTVSS

SEQ ID NO: 148 - protein, 122 aa, Artificial
  An artificially generated sequence
QVQLVESGGGLVQPGRSLRLSCAASGFTFSNAWMHWVRQAPGKGLEWVAQIKDKSQNYATYYAESVQGRFTISRDDSKNSLYLQMNSLKTEDTAVYYCRYVHYAAGYGVDAWGQGTTVTVSS

SEQ ID NO: 149 - protein, 122 aa, Artificial
  An artificially generated sequence
QVQLVESGGGLVQPGRSLRLSCAASGFTFSNAWMHWVRQAPGKGLEWVAQIKDKSQNYATYYAESVSGRFTISRDDSKNSLYLQMNSLKTEDTAVYYCRYVHYAAGYGVDAWGQGTTVTVSS

SEQ ID NO: 150 - protein, 122 aa, Artificial
  An artificially generated sequence
QVQLVESGGGLVQPGRSLRLSCAASGFTFSNAWMHWVRQAPGKGLEWVAQIKDKSQNYAFYYAESVKGRFTISRDDSKNSLYLQMNSLKTEDTAVYYCRYVHYAAGYGVDAWGQGTTVTVSS

SEQ ID NO: 151 - protein, 122 aa, Artificial
  An artificially generated sequence
QVQLVESGGGLVQPGRSLRLSCAASGFTFSNAWMHWVRQAPGKGLEWVAQIKDKSQNYAGYYAESVKGRFTISRDDSKNSLYLQMNSLKTEDTAVYYCRYVHYAAGYGVDAWGQGTTVTVSS

SEQ ID NO: 152 - protein, 122 aa, Artificial
  An artificially generated sequence
QVQLVESGGGLVQPGRSLRLSCAASGFTFSNAWMHWVRQAPGKGLEWVAQIKDKSQNYALYYAESVKGRFTISRDDSKNSLYLQMNSLKTEDTAVYYCRYVHYAAGYGVDAWGQGTTVTVSS

SEQ ID NO: 153 - protein, 122 aa, Artificial
  An artificially generated sequence
QVQLVESGGGLVQPGRSLRLSCAASGFTFSNAWMHWVRQAPGKGLEWVAQIKDKSQNYAPYYAESVKGRFTISRDDSKNSLYLQMNSLKTEDTAVYYCRYVHYAAGYGVDAWGQGTTVTVSS

SEQ ID NO: 154 - protein, 122 aa, Artificial
  An artificially generated sequence
QVQLVESGGGLVQPGRSLRLSCAASGFTFSNAWMHWVRQAPGKGLEWVAQIKDKSQNYAQYYAESVKGRFTISRDDSKNSLYLQMNSLKTEDTAVYYCRYVHYAAGYGVDAWGQGTTVTVSS

SEQ ID NO: 155 - protein, 122 aa, Artificial
  An artificially generated sequence
QVQLVESGGGLVQPGRSLRLSCAASGFTFSNAWMHWVRQAPGKGLEWVAQIKDKSQNYASYYAESVKGRFTISRDDSKNSLYLQMNSLKTEDTAVYYCRYVHYAAGYGVDAWGQGTTVTVSS

SEQ ID NO: 156 - protein, 122 aa, Artificial
  An artificially generated sequence
QVQLVESGGGLVQPGRSLRLSCAASGFTFSNAWMHWVRQAPGKGLEWVAQIKDKSQNYAVYYAESVKGRFTISRDDSKNSLYLQMNSLKTEDTAVYYCRYVHYAAGYGVDAWGQGTTVTVSS

SEQ ID NO: 157 - protein, 122 aa, Artificial
  An artificially generated sequence
QVQLVESGGGLVQPGRSLRLSCAASGFTFSNAWMHWVRQAPGKGLEWVAQIKDKSQNYATYFAESVKGRFTISRDDSKNSLYLQMNSLKTEDTAVYYCRYVHYAAGYGVDAWGQGTTVTVSS

SEQ ID NO: 158 - protein, 122 aa, Artificial
  An artificially generated sequence
QVQLVESGGGLVQPGRSLRLSCAASGFTFSNAWMHWVRQAPGKGLEWVAQIKDKSQNYATYGAESVKGRFTISRDDSKNSLYLQMNSLKTEDTAVYYCRYVHYAAGYGVDAWGQGTTVTVSS

SEQ ID NO: 159 - protein, 122 aa, Artificial
  An artificially generated sequence
QVQLVESGGGLVQPGRSLRLSCAASGFTFSNAWMHWVRQAPGKGLEWVAQIKDKSQNYATYIAESVKGRFTISRDDSKNSLYLQMNSLKTEDTAVYYCRYVHYAAGYGVDAWGQGTTVTVSS

SEQ ID NO: 160 - protein, 122 aa, Artificial
  An artificially generated sequence
QVQLVESGGGLVQPGRSLRLSCAASGFTFSNAWMHWVRQAPGKGLEWVAQIKDKSQNYATYLAESVKGRFTISRDDSKNSLYLQMNSLKTEDTAVYYCRYVHYAAGYGVDAWGQGTTVTVSS

SEQ ID NO: 161 - protein, 122 aa, Artificial
  An artificially generated sequence
QVQLVESGGGLVQPGRSLRLSCAASGFTFSNAWMHWVRQAPGKGLEWVAQIKDKSQNYATYPAESVKGRFTISRDDSKNSLYLQMNSLKTEDTAVYYCRYVHYAAGYGVDAWGQGTTVTVSS

SEQ ID NO: 162 - protein, 122 aa, Artificial
  An artificially generated sequence
QVQLVESGGGLVQPGRSLRLSCAASGFTFSNAWMHWVRQAPGKGLEWVAQIKDKSQNYATYQAESVKGRFTISRDDSKNSLYLQMNSLKTEDTAVYYCRYVHYAAGYGVDAWGQGTTVTVSS

SEQ ID NO: 163 - protein, 122 aa, Artificial
  An artificially generated sequence
QVQLVESGGGLVQPGRSLRLSCAASGFTFSNAWMHWVRQAPGKGLEWVAQIKDKSQNYATYTAESVKGRFTISRDDSKNSLYLQMNSLKTEDTAVYYCRYVHYAAGYGVDAWGQGTTVTVSS

SEQ ID NO: 164 - protein, 122 aa, Artificial
  An artificially generated sequence
QVQLVESGGGLVQPGRSLRLSCAASGFTFSNAWMHWVRQAPGKGLEWVAQIKDKSQNYATYVAESVKGRFTISRDDSKNSLYLQMNSLKTEDTAVYYCRYVHYAAGYGVDAWGQGTTVTVSS

SEQ ID NO: 165 - protein, 122 aa, Artificial
  An artificially generated sequence
QVQLVESGGGVVQPGRSLKLSCAASGFTFSNAWMHWVRQAPGKGLEWVAQIKDKSQNYATYYAESVKGRFTISRDDSKNSLYLQMNSLKTEDTAVYYCRYVHYAAGYGVDAWGQGTTVTVSS

SEQ ID NO: 166 - protein, 122 aa, Artificial
  An artificially generated sequence
QVQLVESGGGVVQPGGSLKLSCAASGFTFSNAWMHWVRQAPGKGLEWVAQIKDKSQNYATYYAESVKGRFTISRADSKNSIYLQMNSLKTEDTAVYYCRYVHYAAGYGVDIWGQGTTVTVSS

SEQ ID NO: 167 - protein, 122 aa, Artificial
  An artificially generated sequence
QVQLVESGGGVVQPGGSLRLSCAASGFTFSNAWMHWVRQAPGKGLEWVAQIKDKSQNYAQYYAESVKGRFTISRADSKNSIYLQMNSLKTEDTAVYYCRYVHYAAGYGVDIWGQGTTVTVSS

SEQ ID NO: 168 - protein, 122 aa, Artificial
  An artificially generated sequence
QVQLVESGGGVVQPGGSLRLSCAASGFTFSNAWMHWVRQAPGKGLEWVAQIKDKSQNYATYVAESVKGRFTISRADSKNSIYLQMNSLKTEDTAVYYCRYVHYAAGYGVDIWGQGTTVTVSS

SEQ ID NO: 169 - protein, 122 aa, Artificial
  An artificially generated sequence
QVQLVESGGGVVQPGGSLRLSCAASGFTFSNAWMHWVRQAPGKGLEWVAQIKDKSQNYASYYAESVKGRFTISRADSKNSIYLQMNSLKTEDTAVYYCRYVHYAAGYGVDIWGQGTTVTVSS

SEQ ID NO: 170 - protein, 115 aa, Artificial
  An artificially generated sequence
QVQLVQSGAEVKKPGASVKVSCKASGYTFTDYEMHWIRQPPGQGLEWIGAIDGDTPDTAYSQKFKGRVTLTADKSTSTAYMELSSLTSEDTAVYYCTRFYSYTYWGQGTLVTVSS

SEQ ID NO: 171 - protein, 115 aa, Artificial
  An artificially generated sequence
QVQLVQSGAEVKKPGASVKVSCKASGYTFTDYEMHWIRQPPGQGLEWIGAIDGKTPDTAESQKFKGRVTLTADKSTSTAYMELSSLTSEDTAVYYCTRFYSYTYWGQGTLVTVSS

SEQ ID NO: 172 - protein, 115 aa, Artificial
  An artificially generated sequence
QVQLVQSGAEVKKPGASVKVSCKASGYTFTDYEMHWIRQPPGQGLEWIGAIDGKTPDTAYEQKFKGRVTLTADKSTSTAYMELSSLTSEDTAVYYCTRFYSYTYWGQGTLVTVSS

SEQ ID NO: 173 - protein, 115 aa, Artificial
  An artificially generated sequence
QVQLVQSGAEVKKPGASVKVSCKASGYTFTDYEMHWIRQPPGQGLEWIGAIDGKTPDTAYSDKFKGRVTLTADKSTSTAYMELSSLTSEDTAVYYCTRFYSYTYWGQGTLVTVSS

SEQ ID NO: 174 - protein, 115 aa, Artificial
  An artificially generated sequence
QVQLVQSGAEVKKPGASVKVSCKASGYTFTDYEMHWIRQPPGQGLEWIGAIDGETPDTAYSQKFKGRVTLTADKSTSTAYMELSSLTSEDTAVYYCTRFYSYTYWGQGTLVTVSS

SEQ ID NO: 175 - protein, 115 aa, Artificial
  An artificially generated sequence
QVQLVQSGAEVKKPGASVKVSCKASGYTFTDYEMHWIRQPPGQGLEWIGAIDGDTPDTAYEQKFKGRVTLTADKSTSTAYMELSSLTSEDTAVYYCTRFYSYTYWGQGTLVTVSS

SEQ ID NO: 176 - protein, 115 aa, Artificial
  An artificially generated sequence
QVQLVQSGAEVKKPGASVKVSCKASGYTFTDYEMHWIRQPPGQGLEWIGAIDGKTPDTAEEQKFKGRVTLTADKSTSTAYMELSSLTSEDTAVYYCTRFYSYTYWGQGTLVTVSS

SEQ ID NO: 177 - protein, 115 aa, Artificial
  An artificially generated sequence
QVQLVQSGAEVKKPGASVTVSCKASGYTFTDYEMHWIRQPPGQGLEWIGAIDGKTPDTAYEQKFKGRVTLTADKSTSTAYMELSSLTSEDTAVYYCTRFYSYTYWGQGTLVTVSS

SEQ ID NO: 178 - protein, 115 aa, Artificial
  An artificially generated sequence
QVQLVQSGAEVKKPGASVKVSCKASGYTFTDYEMHWIRQPPGEGLEWIGAIDGKTPDTAYEQKFKGRVTLTADKSTSTAYMELSSLTSEDTAVYYCTRFYSYTYWGQGTLVTVSS

SEQ ID NO: 179 - protein, 115 aa, Artificial
  An artificially generated sequence
QVQLVQSGAEVKKPGASVKVSCKASGYTFTDYEMHWIRQPPGQGLEWIGAIDGKTPDTAYEESFKGRVTLTADKSTSTAYMELSSLTSEDTAVYYCTRFYSYTYWGQGTLVTVSS

SEQ ID NO: 180 - protein, 115 aa, Artificial
  An artificially generated sequence
QVQLVQSGAEVKKPGASVKVSCKASGYTFTDYEMHWIRQPPGQGLEWIGAIDGKTPDTAYEQKFQDRVTLTADKSTSTAYMELSSLTSEDTAVYYCTRFYSYTYWGQGTLVTVSS

SEQ ID NO: 181 - protein, 115 aa, Artificial
  An artificially generated sequence
QVQLVQSGAEVKKPGASVTVSCKASGYTFTDYEMHWIRQPPGEGLEWIGAIDGKTPDTAYEQKFKGRVTLTADKSTSTAYMELSSLTSEDTAVYYCTRFYSYTYWGQGTLVTVSS

SEQ ID NO: 182 - protein, 115 aa, Artificial
  An artificially generated sequence
QVQLVQSGAEVKKPGASVTVSCKASGYTFTDYEMHWIRQPPGQGLEWIGAIDGETPDTAYSQKFKGRVTLTADKSTSTAYMELSSLTSEDTAVYYCTRFYSYTYWGQGTLVTVSS

SEQ ID NO: 183 - protein, 115 aa, Artificial
  An artificially generated sequence
QVQLVQSGAEVKKPGASVKVSCKASGYTFTDYEMHWIRQPPGEGLEWIGAIDGETPDTAYSQKFKGRVTLTADKSTSTAYMELSSLTSEDTAVYYCTRFYSYTYWGQGTLVTVSS

SEQ ID NO: 184 - protein, 115 aa, Artificial
  An artificially generated sequence
QVQLVQSGAEVKKPGASVTVSCKASGYTFTDYEMHWIRQPPGEGLEWIGAIDGETPDTAYSQKFKGRVTLTADKSTSTAYMELSSLTSEDTAVYYCTRFYSYTYWGQGTLVTVSS

SEQ ID NO: 185 - protein, 115 aa, Artificial
  An artificially generated sequence
QVQLVQSGAEVKKPGASVKVSCKASGYTFTDYEMHWIRQPPGQGLEWIGAIDGETPDTAYSESFKGRVTLTADKSTSTAYMELSSLTSEDTAVYYCTRFYSYTYWGQGTLVTVSS

SEQ ID NO: 186 - protein, 115 aa, Artificial
  An artificially generated sequence
QVQLVQSGAEVKKPGASVKVSCKASGYEFTDYEMHWIRQPPGQGLEWIGAIDGKTPDTAYSQKFKGRVTLTADKSTSTAYMELSSLTSEDTAVYYCTRFYSYTYWGQGTLVTVSS

SEQ ID NO: 187 - protein, 115 aa, Artificial
  An artificially generated sequence
QVQLVQSGAEVKKPGASVKVSCKASGYTFEDYEMHWIRQPPGQGLEWIGAIDGKTPDTAYSQKFKGRVTLTADKSTSTAYMELSSLTSEDTAVYYCTRFYSYTYWGQGTLVTVSS

SEQ ID NO: 188 - protein, 115 aa, Artificial
  An artificially generated sequence
QVQLVQSGAEVKKPGASVKVSCKASGYTFTDYEMHWIRQPPGQGLEWIGAIDGKTPDTAYSEKFKGRVTLTADKSTSTAYMELSSLTSEDTAVYYCTRFYSYTYWGQGTLVTVSS

SEQ ID NO: 189 - protein, 115 aa, Artificial
  An artificially generated sequence
QVQLVQSGAEVKKPGASVKVSCKASGYTFTDYEMHWIRQPPGQGLEWIGAIDGKTPDTAYSQKFEGRVTLTADKSTSTAYMELSSLTSEDTAVYYCTRFYSYTYWGQGTLVTVSS

SEQ ID NO: 190 - protein, 115 aa, Artificial
  An artificially generated sequence
QVQLVQSGAEVKKPGASVKVSCKASGYTFTDYEMHWIRQPPGQGLEWIGAIDGKTPDTAYSQKFKGRVELTADKSTSTAYMELSSLTSEDTAVYYCTRFYSYTYWGQGTLVTVSS

SEQ ID NO: 191 - protein, 115 aa, Artificial
  An artificially generated sequence
QVQLVQSGAEVKKPGASVKVSCKASGYTFTDYEMHWIRQPPGQGLEWIGAIDGKTPDTAYSQKFKGRVTLTADKSTSTAYMELESLTSEDTAVYYCTRFYSYTYWGQGTLVTVSS

SEQ ID NO: 192 - protein, 115 aa, Artificial
  An artificially generated sequence
QVQLVQSGAEVKKPGASVKVSCKASGYTFTDYEMHWIRQPPGQGLEWIGAIDGKTPDTAYSQKFKGRVTLTADKSTSTAYMELSELTSEDTAVYYCTRFYSYTYWGQGTLVTVSS

SEQ ID NO: 193 - protein, 115 aa, Artificial
  An artificially generated sequence
QVQLVQSGAEVKKPGASVKVSCKASGYTFTDYEMHWIRQPPGQGLEWIGAIDGKTPDTAYSQKFKGRVTLTADKSTSTAYMELSSLTEEDTAVYYCTRFYSYTYWGQGTLVTVSS

SEQ ID NO: 194 - protein, 115 aa, Artificial
  An artificially generated sequence
QVQLVQSGAEVKKPGASVKVSCKASGYTFTDYEMHWIRQPPGQGLEWIGAIDGKTPDTAYSQKFKGRVTLTADKSTSTAYMELSSLTSEDEAVYYCTRFYSYTYWGQGTLVTVSS

SEQ ID NO: 195 - protein, 115 aa, Artificial
  An artificially generated sequence
QVQLVQSGAEVKKPGASVKVSCKASGYTFTDYEMHWIRQPPGQGLEWIGAIDGKTPDTAYSQKFKGRVTLTADKSTSTAYMELSSLTSEDTAEYYCTRFYSYTYWGQGTLVTVSS

SEQ ID NO: 196 - protein, 115 aa, Artificial
  An artificially generated sequence
QVQLVQSGAEVKKPGASVTVSCKASGYTFTDYEMHWIRQPPGEGLEWIGAIDGETPDTAYEQKFKGRVTLTADKSTSTAYMELSSLTSEDTAVYYCTRFYSYTYWGQGTLVTVSS

SEQ ID NO: 197 - protein, 115 aa, Artificial
  An artificially generated sequence
QVQLVQSGAEVKKPGASVTVSCKASGYTFTDYEMHWIRQPPGEGLEWIGAIDGETPDTAYSEKFKGRVTLTADKSTSTAYMELSSLTSEDTAVYYCTRFYSYTYWGQGTLVTVSS

SEQ ID NO: 198 - protein, 115 aa, Artificial
  An artificially generated sequence
QVQLVQSGAEVKKPGASVTVSCKASGYTFTDYEMHWIRQPPGEGLEWIGAIDGETPDTAYSDKFKGRVTLTADKSTSTAYMELSSLTSEDTAVYYCTRFYSYTYWGQGTLVTVSS

SEQ ID NO: 199 - protein, 115 aa, Artificial
  An artificially generated sequence
QVQLVQSGAEVKKPGASVTVSCKASGYTFTDYEMHWIRQPPGEGLEWIGAIDGETPDTAYSQKFEGRVTLTADKSTSTAYMELSSLTSEDTAVYYCTRFYSYTYWGQGTLVTVSS

SEQ ID NO: 200 - protein, 115 aa, Artificial
  An artificially generated sequence
QVQLVQSGAEVKKPGASVTVSCKASGYTFTDYEMHWIRQPPGEGLEWIGAIDGETPDTAYSEKFEGRVTLTADKSTSTAYMELSSLTSEDTAVYYCTRFYSYTYWGQGTLVTVSS

SEQ ID NO: 201 - protein, 115 aa, Artificial
  An artificially generated sequence
QVQLVQSGAEVKKPGASVTVSCKASGYTFTDYEMHWIRQPPGEGLEWIGAIDGETPDTAYSQKFEGRVTLTADKSTSTAYMELSSLTEEDTAVYYCTRFYSYTYWGQGTLVTVSS

SEQ ID NO: 202 - protein, 115 aa, Artificial
  An artificially generated sequence
QVQLVQSGAEVKKPGASVTVSCKASGYTFEDYEMHWIRQPPGEGLEWIGAIDGETPDTAYSQKFEGRVTLTADKSTSTAYMELSSLTEEDTAVYYCTRFYSYTYWGQGTLVTVSS

SEQ ID NO: 203 - protein, 115 aa, Artificial
  An artificially generated sequence
QVQLVQSGAEVKKPGASVKVSCKASGYTFTDYEMHWVRQAPGQGLEWIGAIDGKTPDTAYSQKFKGRVTLTADKSTSTAYMELSSLTSEDTAVYYCTRFYSYTYWGQGTLVTVSS

SEQ ID NO: 204 - protein, 115 aa, Artificial
  An artificially generated sequence
QVQLVQSGAEVKKPGASVKVSCKASGYTFTDYEMHWIRQPPGQGLEWMGAIDGKTPDTAYSQKFKGRVTLTADKSTSTAYMELSSLTSEDTAVYYCTRFYSYTYWGQGTLVTVSS

SEQ ID NO: 205 - protein, 115 aa, Artificial
  An artificially generated sequence
QVQLVQSGAEVKKPGASVKVSCKASGYTFTDYEMHWIRQPPGQGLEWIGAIDGKTPDTAYSQKFKGRVTLTADKSTSTAYMELSSLRSEDTAVYYCTRFYSYTYWGQGTLVTVSS

SEQ ID NO: 206 - protein, 115 aa, Artificial
  An artificially generated sequence
QVQLVQSGAEVKKPGASVTVSCKASGYTFTDYEMHWIRQPPGEGLEWIGAIDGPTPDTAYSEKFKGRVTLTADKSTSTAYMELSSLTSEDTAVYYCTRFYSYTYWGQGTLVTVSS

SEQ ID NO: 207 - protein, 115 aa, Artificial
  An artificially generated sequence
QVQLVQSGAEVKKPGASVTVSCKASGYTFTDYEMHWIRQPPGEGLEWIGAIDGWTPDTAYSEKFKGRVTLTADKSTSTAYMELSSLTSEDTAVYYCTRFYSYTYWGQGTLVTVSS

SEQ ID NO: 208 - protein, 115 aa, Artificial
  An artificially generated sequence
QVQLVQSGAEVKKPGASVTVSCKASGYTFTDYEMHWIRQPPGEGLEWIGAIDGYTPDTAYSEKFKGRVTLTADKSTSTAYMELSSLTSEDTAVYYCTRFYSYTYWGQGTLVTVSS

SEQ ID NO: 209 - protein, 115 aa, Artificial
  An artificially generated sequence
QVQLVQSGAEVKKPGASVTVSCKASGYTFTDYEMHWIRQPPGEGLEWIGAIDGKTPDTAYSEKFKGRVTLTADKSTSTAYMELSSLTSEDTAVYYCTRFYSYTYWGQGTLVTVSS

SEQ ID NO: 210 - protein, 115 aa, Artificial
  An artificially generated sequence
QVQLVQSGAEVKKPGASVTVSCKASGYTFTDYEMHWIRQPPGEGLEWIGAIDGPTPDTAYSQKFEGRVTLTADKSTSTAYMELSSLTSEDTAVYYCTRFYSYTYWGQGTLVTVSS

SEQ ID NO: 211 - protein, 115 aa, Artificial
  An artificially generated sequence
QVQLVQSGAEVKKPGASVTVSCKASGYTFTDYEMHWVRQAPGEGLEWMGAIDGETPDTAYSEKFKGRVTLTADKSTSTAYMELSSLTSEDTAVYYCTRFYSYTYWGQGTLVTVSS

SEQ ID NO: 212 - protein, 115 aa, Artificial
  An artificially generated sequence
QVQLVQSGAEVKKPGASVTVSCKASGYTFTDYEMHWVRQAPGEGLEWMGAIDGPTPDTAYSEKFKGRVTLTADKSTSTAYMELSSLTSEDTAVYYCTRFYSYTYWGQGTLVTVSS

SEQ ID NO: 213 - protein, 115 aa, Artificial
  An artificially generated sequence
QVQLVQSGAEVKKPGASVTVSCKASGYTFTDYEMHWVRQAPGEGLEWMGAIDGWTPDTAYSEKFKGRVTLTADKSTSTAYMELSSLTSEDTAVYYCTRFYSYTYWGQGTLVTVSS

SEQ ID NO: 214 - protein, 115 aa, Artificial
  An artificially generated sequence
QVQLVQSGAEVKKPGASVTVSCKASGYTFTDYEMHWVRQAPGEGLEWMGAIDGYTPDTAYSEKFKGRVTLTADKSTSTAYMELSSLTSEDTAVYYCTRFYSYTYWGQGTLVTVSS

SEQ ID NO: 215 - protein, 115 aa, Artificial
  An artificially generated sequence
QVQLVQSGAEVKKPGASVKVSCKASGYTFTDYEMHWIRQPPGQGLEWIGAIDGKTPDTAYSQKFKGRVTLTADKSTSTAYMELSSLTSEDTAVYYCTRFYSYTYWGQGTLVTVSS

SEQ ID NO: 216 - protein, 112 aa, Artificial
  An artificially generated sequence
DIQMTQSPSSLSASVGDRVTITCRSSQSLVHSNRNTYLHWYQQKPGKAPKLLIYKVSNRFSGVPSRFSGSGSGTDFTFTISSLQPEDIATYYCGQGTQVPYTFGQGTKVEIK

SEQ ID NO: 217 - protein, 112 aa, Artificial
  An artificially generated sequence
DIVMTQSPLSLPVTPGEPASISCRASQSLVHSNRNTYLHWYQQKPGQAPRLLIYKVSNRFSGVPDRFSGSGSGTDFTLKISRVEAEDVGVYYCGQGTQVPYTFGQGTKLEIK

SEQ ID NO: 218 - protein, 112 aa, Artificial
  An artificially generated sequence
DIVMTQSPLSLPVTPGEPASISCRISQSLVHSNRNTYLHWYQQKPGQAPRLLIYKVSNRFSGVPDRFSGSGSGTDFTLKISRVEAEDVGVYYCGQGTQVPYTFGQGTKLEIK

SEQ ID NO: 219 - protein, 112 aa, Artificial
  An artificially generated sequence
DIVMTQSPLSLPVTPGEPASISCRPSQSLVHSNRNTYLHWYQQKPGQAPRLLIYKVSNRFSGVPDRFSGSGSGTDFTLKISRVEAEDVGVYYCGQGTQVPYTFGQGTKLEIK

SEQ ID NO: 220 - protein, 112 aa, Artificial
  An artificially generated sequence
DIVMTQSPLSLPVTPGEPASISCRTSQSLVHSNRNTYLHWYQQKPGQAPRLLIYKVSNRFSGVPDRFSGSGSGTDFTLKISRVEAEDVGVYYCGQGTQVPYTFGQGTKLEIK

SEQ ID NO: 221 - protein, 112 aa, Artificial
  An artificially generated sequence
DIVMTQSPLSLPVTPGEPASISCRVSQSLVHSNRNTYLHWYQQKPGQAPRLLIYKVSNRFSGVPDRFSGSGSGTDFTLKISRVEAEDVGVYYCGQGTQVPYTFGQGTKLEIK

SEQ ID NO: 222 - protein, 112 aa, Artificial
  An artificially generated sequence
DIVMTQSPLSLPVTPGEPASISCRSPQSLVHSNRNTYLHWYQQKPGQAPRLLIYKVSNRFSGVPDRFSGSGSGTDFTLKISRVEAEDVGVYYCGQGTQVPYTFGQGTKLEIK

SEQ ID NO: 223 - protein, 112 aa, Artificial
  An artificially generated sequence
DIVMTQSPLSLPVTPGEPASISCRSSQPLVHSNRNTYLHWYQQKPGQAPRLLIYKVSNRFSGVPDRFSGSGSGTDFTLKISRVEAEDVGVYYCGQGTQVPYTFGQGTKLEIK

SEQ ID NO: 224 - protein, 112 aa, Artificial
  An artificially generated sequence
DIVMTQSPLSLPVTPGEPASISCRSSQSFVHSNRNTYLHWYQQKPGQAPRLLIYKVSNRFSGVPDRFSGSGSGTDFTLKISRVEAEDVGVYYCGQGTQVPYTFGQGTKLEIK

SEQ ID NO: 225 - protein, 112 aa, Artificial
  An artificially generated sequence
DIVMTQSPLSLPVTPGEPASISCRSSQSIVHSNRNTYLHWYQQKPGQAPRLLIYKVSNRFSGVPDRFSGSGSGTDFTLKISRVEAEDVGVYYCGQGTQVPYTFGQGTKLEIK

SEQ ID NO: 226 - protein, 112 aa, Artificial
  An artificially generated sequence
DIVMTQSPLSLPVTPGEPASISCRSSQSMVHSNRNTYLHWYQQKPGQAPRLLIYKVSNRFSGVPDRFSGSGSGTDFTLKISRVEAEDVGVYYCGQGTQVPYTFGQGTKLEIK

SEQ ID NO: 227 - protein, 112 aa, Artificial
  An artificially generated sequence
DIVMTQSPLSLPVTPGEPASISCRSSQSPVHSNRNTYLHWYQQKPGQAPRLLIYKVSNRFSGVPDRFSGSGSGTDFTLKISRVEAEDVGVYYCGQGTQVPYTFGQGTKLEIK

SEQ ID NO: 228 - protein, 112 aa, Artificial
  An artificially generated sequence
DIVMTQSPLSLPVTPGEPASISCRSSQSVVHSNRNTYLHWYQQKPGQAPRLLIYKVSNRFSGVPDRFSGSGSGTDFTLKISRVEAEDVGVYYCGQGTQVPYTFGQGTKLEIK

SEQ ID NO: 229 - protein, 112 aa, Artificial
  An artificially generated sequence
DIVMTQSPLSLPVTPGEPASISCRSSQSLVRSNRNTYLHWYQQKPGQAPRLLIYKVSNRFSGVPDRFSGSGSGTDFTLKISRVEAEDVGVYYCGQGTQVPYTFGQGTKLEIK

SEQ ID NO: 230 - protein, 112 aa, Artificial
  An artificially generated sequence
DIVMTQSPLSLPVTPGEPASISCRSSQSLVHFNRNTYLHWYQQKPGQAPRLLIYKVSNRFSGVPDRFSGSGSGTDFTLKISRVEAEDVGVYYCGQGTQVPYTFGQGTKLEIK

SEQ ID NO: 231 - protein, 112 aa, Artificial
  An artificially generated sequence
DIVMTQSPLSLPVTPGEPASISCRSSQSLVHHNRNTYLHWYQQKPGQAPRLLIYKVSNRFSGVPDRFSGSGSGTDFTLKISRVEAEDVGVYYCGQGTQVPYTFGQGTKLEIK

SEQ ID NO: 232 - protein, 112 aa, Artificial
  An artificially generated sequence
DIVMTQSPLSLPVTPGEPASISCRSSQSLVHLNRNTYLHWYQQKPGQAPRLLIYKVSNRFSGVPDRFSGSGSGTDFTLKISRVEAEDVGVYYCGQGTQVPYTFGQGTKLEIK

SEQ ID NO: 233 - protein, 112 aa, Artificial
  An artificially generated sequence
DIVMTQSPLSLPVTPGEPASISCRSSQSLVHMNRNTYLHWYQQKPGQAPRLLIYKVSNRFSGVPDRFSGSGSGTDFTLKISRVEAEDVGVYYCGQGTQVPYTFGQGTKLEIK

SEQ ID NO: 234 - protein, 112 aa, Artificial
  An artificially generated sequence
DIVMTQSPLSLPVTPGEPASISCRSSQSLVHNNRNTYLHWYQQKPGQAPRLLIYKVSNRFSGVPDRFSGSGSGTDFTLKISRVEAEDVGVYYCGQGTQVPYTFGQGTKLEIK

SEQ ID NO: 235 - protein, 112 aa, Artificial
  An artificially generated sequence
DIVMTQSPLSLPVTPGEPASISCRSSQSLVHPNRNTYLHWYQQKPGQAPRLLIYKVSNRFSGVPDRFSGSGSGTDFTLKISRVEAEDVGVYYCGQGTQVPYTFGQGTKLEIK

SEQ ID NO: 236 - protein, 112 aa, Artificial
  An artificially generated sequence
DIVMTQSPLSLPVTPGEPASISCRSSQSLVHQNRNTYLHWYQQKPGQAPRLLIYKVSNRFSGVPDRFSGSGSGTDFTLKISRVEAEDVGVYYCGQGTQVPYTFGQGTKLEIK

SEQ ID NO: 237 - protein, 112 aa, Artificial
  An artificially generated sequence
DIVMTQSPLSLPVTPGEPASISCRSSQSLVHVNRNTYLHWYQQKPGQAPRLLIYKVSNRFSGVPDRFSGSGSGTDFTLKISRVEAEDVGVYYCGQGTQVPYTFGQGTKLEIK

SEQ ID NO: 238 - protein, 112 aa, Artificial
  An artificially generated sequence
DIVMTQSPLSLPVTPGEPASISCRSSQSLVHWNRNTYLHWYQQKPGQAPRLLIYKVSNRFSGVPDRFSGSGSGTDFTLKISRVEAEDVGVYYCGQGTQVPYTFGQGTKLEIK

SEQ ID NO: 239 - protein, 112 aa, Artificial
  An artificially generated sequence
DIVMTQSPLSLPVTPGEPASISCRSSQSLVHSNRDTYLHWYQQKPGQAPRLLIYKVSNRFSGVPDRFSGSGSGTDFTLKISRVEAEDVGVYYCGQGTQVPYTFGQGTKLEIK

SEQ ID NO: 240 - protein, 112 aa, Artificial
  An artificially generated sequence
DIVMTQSPLSLPVTPGEPASISCRSSQSLVHSNRETYLHWYQQKPGQAPRLLIYKVSNRFSGVPDRFSGSGSGTDFTLKISRVEAEDVGVYYCGQGTQVPYTFGQGTKLEIK

SEQ ID NO: 241 - protein, 112 aa, Artificial
  An artificially generated sequence
DIVMTQSPLSLPVTPGEPASISCRSSQSLVHSNRFTYLHWYQQKPGQAPRLLIYKVSNRFSGVPDRFSGSGSGTDFTLKISRVEAEDVGVYYCGQGTQVPYTFGQGTKLEIK

SEQ ID NO: 242 - protein, 112 aa, Artificial
  An artificially generated sequence
DIVMTQSPLSLPVTPGEPASISCRSSQSLVHSNRGTYLHWYQQKPGQAPRLLIYKVSNRFSGVPDRFSGSGSGTDFTLKISRVEAEDVGVYYCGQGTQVPYTFGQGTKLEIK

SEQ ID NO: 243 - protein, 112 aa, Artificial
  An artificially generated sequence
DIVMTQSPLSLPVTPGEPASISCRSSQSLVHSNRHTYLHWYQQKPGQAPRLLIYKVSNRFSGVPDRFSGSGSGTDFTLKISRVEAEDVGVYYCGQGTQVPYTFGQGTKLEIK

SEQ ID NO: 244 - protein, 112 aa, Artificial
  An artificially generated sequence
DIVMTQSPLSLPVTPGEPASISCRSSQSLVHSNRMTYLHWYQQKPGQAPRLLIYKVSNRFSGVPDRFSGSGSGTDFTLKISRVEAEDVGVYYCGQGTQVPYTFGQGTKLEIK

SEQ ID NO: 245 - protein, 112 aa, Artificial
  An artificially generated sequence
DIVMTQSPLSLPVTPGEPASISCRSSQSLVHSNRWTYLHWYQQKPGQAPRLLIYKVSNRFSGVPDRFSGSGSGTDFTLKISRVEAEDVGVYYCGQGTQVPYTFGQGTKLEIK

SEQ ID NO: 246 - protein, 112 aa, Artificial
  An artificially generated sequence
DIVMTQSPLSLPVTPGEPASISCRSSQSLVHSNRNTYIHWYQQKPGQAPRLLIYKVSNRFSGVPDRFSGSGSGTDFTLKISRVEAEDVGVYYCGQGTQVPYTFGQGTKLEIK

SEQ ID NO: 247 - protein, 112 aa, Artificial
  An artificially generated sequence
DIVMTQSPLSLPVTPGEPASISCRSSQSLVHSNRNTYVHWYQQKPGQAPRLLIYKVSNRFSGVPDRFSGSGSGTDFTLKISRVEAEDVGVYYCGQGTQVPYTFGQGTKLEIK

SEQ ID NO: 248 - protein, 112 aa, Artificial
  An artificially generated sequence
DIVMTQSPLSLPVTPGEPASISCRSSQSLVHSNRNTYLEWYQQKPGQAPRLLIYKVSNRFSGVPDRFSGSGSGTDFTLKISRVEAEDVGVYYCGQGTQVPYTFGQGTKLEIK

SEQ ID NO: 249 - protein, 112 aa, Artificial
  An artificially generated sequence
DIVMTQSPLSLPVTPGEPASISCRSSQSLVHSNRNTYLLWYQQKPGQAPRLLIYKVSNRFSGVPDRFSGSGSGTDFTLKISRVEAEDVGVYYCGQGTQVPYTFGQGTKLEIK

SEQ ID NO: 250 - protein, 112 aa, Artificial
  An artificially generated sequence
DIVMTQSPLSLPVTPGEPASISCRSSQSLVHSNRNTYLMWYQQKPGQAPRLLIYKVSNRFSGVPDRFSGSGSGTDFTLKISRVEAEDVGVYYCGQGTQVPYTFGQGTKLEIK

SEQ ID NO: 251 - protein, 112 aa, Artificial
  An artificially generated sequence
DIVMTQSPLSLPVTPGEPASISCRSSQSLVHSNRNTYLNWYQQKPGQAPRLLIYKVSNRFSGVPDRFSGSGSGTDFTLKISRVEAEDVGVYYCGQGTQVPYTFGQGTKLEIK

SEQ ID NO: 252 - protein, 112 aa, Artificial
  An artificially generated sequence
DIVMTQSPLSLPVTPGEPASISCRSSQSLVHSNRNTYLQWYQQKPGQAPRLLIYKVSNRFSGVPDRFSGSGSGTDFTLKISRVEAEDVGVYYCGQGTQVPYTFGQGTKLEIK

SEQ ID NO: 253 - protein, 112 aa, Artificial
  An artificially generated sequence
DIVMTQSPLSLPVTPGEPASISCRSSQSLVHSNRNTYLHWYQQKPGQAPRLLIYKVSFRFSGVPDRFSGSGSGTDFTLKISRVEAEDVGVYYCGQGTQVPYTFGQGTKLEIK

SEQ ID NO: 254 - protein, 112 aa, Artificial
  An artificially generated sequence
DIVMTQSPLSLPVTPGEPASISCRSSQSLVHSNRNTYLHWYQQKPGQAPRLLIYKVSHRFSGVPDRFSGSGSGTDFTLKISRVEAEDVGVYYCGQGTQVPYTFGQGTKLEIK

SEQ ID NO: 255 - protein, 112 aa, Artificial
  An artificially generated sequence
DIVMTQSPLSLPVTPGEPASISCRSSQSLVHSNRNTYLHWYQQKPGQAPRLLIYKVSIRFSGVPDRFSGSGSGTDFTLKISRVEAEDVGVYYCGQGTQVPYTFGQGTKLEIK

SEQ ID NO: 256 - protein, 112 aa, Artificial
  An artificially generated sequence
DIVMTQSPLSLPVTPGEPASISCRSSQSLVHSNRNTYLHWYQQKPGQAPRLLIYKVSMRFSGVPDRFSGSGSGTDFTLKISRVEAEDVGVYYCGQGTQVPYTFGQGTKLEIK

SEQ ID NO: 257 - protein, 112 aa, Artificial
  An artificially generated sequence
DIVMTQSPLSLPVTPGEPASISCRSSQSLVHSNRNTYLHWYQQKPGQAPRLLIYKVSTRFSGVPDRFSGSGSGTDFTLKISRVEAEDVGVYYCGQGTQVPYTFGQGTKLEIK

SEQ ID NO: 258 - protein, 112 aa, Artificial
  An artificially generated sequence
DIVMTQSPLSLPVTPGEPASISCRSSQSLVHSNRNTYLHWYQQKPGQAPRLLIYKVSWRFSGVPDRFSGSGSGTDFTLKISRVEAEDVGVYYCGQGTQVPYTFGQGTKLEIK

SEQ ID NO: 259 - protein, 112 aa, Artificial
  An artificially generated sequence
DIVMTQSPLSLPVTPGEPASISCRSSQSLVHSNRNTYLHWYQQKPGQAPRLLIYKVSNRASGVPDRFSGSGSGTDFTLKISRVEAEDVGVYYCGQGTQVPYTFGQGTKLEIK

SEQ ID NO: 260 - protein, 112 aa, Artificial
  An artificially generated sequence
DIVMTQSPLSLPVTPGEPASISCRSSQSLVHSNRNTYLHWYQQKPGQAPRLLIYKVSNRGSGVPDRFSGSGSGTDFTLKISRVEAEDVGVYYCGQGTQVPYTFGQGTKLEIK

SEQ ID NO: 261 - protein, 112 aa, Artificial
  An artificially generated sequence
DIVMTQSPLSLPVTPGEPASISCRSSQSLVHSNRNTYLHWYQQKPGQAPRLLIYKVSNRISGVPDRFSGSGSGTDFTLKISRVEAEDVGVYYCGQGTQVPYTFGQGTKLEIK

SEQ ID NO: 262 - protein, 112 aa, Artificial
  An artificially generated sequence
DIVMTQSPLSLPVTPGEPASISCRSSQSLVHSNRNTYLHWYQQKPGQAPRLLIYKVSNRKSGVPDRFSGSGSGTDFTLKISRVEAEDVGVYYCGQGTQVPYTFGQGTKLEIK

SEQ ID NO: 263 - protein, 112 aa, Artificial
  An artificially generated sequence
DIVMTQSPLSLPVTPGEPASISCRSSQSLVHSNRNTYLHWYQQKPGQAPRLLIYKVSNRLSGVPDRFSGSGSGTDFTLKISRVEAEDVGVYYCGQGTQVPYTFGQGTKLEIK

SEQ ID NO: 264 - protein, 112 aa, Artificial
  An artificially generated sequence
DIVMTQSPLSLPVTPGEPASISCRSSQSLVHSNRNTYLHWYQQKPGQAPRLLIYKVSNRMSGVPDRFSGSGSGTDFTLKISRVEAEDVGVYYCGQGTQVPYTFGQGTKLEIK

SEQ ID NO: 265 - protein, 112 aa, Artificial
  An artificially generated sequence
DIVMTQSPLSLPVTPGEPASISCRSSQSLVHSNRNTYLHWYQQKPGQAPRLLIYKVSNRNSGVPDRFSGSGSGTDFTLKISRVEAEDVGVYYCGQGTQVPYTFGQGTKLEIK

SEQ ID NO: 266 - protein, 112 aa, Artificial
  An artificially generated sequence
DIVMTQSPLSLPVTPGEPASISCRSSQSLVHSNRNTYLHWYQQKPGQAPRLLIYKVSNRPSGVPDRFSGSGSGTDFTLKISRVEAEDVGVYYCGQGTQVPYTFGQGTKLEIK

SEQ ID NO: 267 - protein, 112 aa, Artificial
  An artificially generated sequence
DIVMTQSPLSLPVTPGEPASISCRSSQSLVHSNRNTYLHWYQQKPGQAPRLLIYKVSNRRSGVPDRFSGSGSGTDFTLKISRVEAEDVGVYYCGQGTQVPYTFGQGTKLEIK

SEQ ID NO: 268 - protein, 112 aa, Artificial
  An artificially generated sequence
DIVMTQSPLSLPVTPGEPASISCRSSQSLVHSNRNTYLHWYQQKPGQAPRLLIYKVSNRVSGVPDRFSGSGSGTDFTLKISRVEAEDVGVYYCGQGTQVPYTFGQGTKLEIK

SEQ ID NO: 269 - protein, 112 aa, Artificial
  An artificially generated sequence
DIVMTQSPLSLPVTPGEPASISCRSSQSLVHSNRNTYLHWYQQKPGQAPRLLIYKVSNRYSGVPDRFSGSGSGTDFTLKISRVEAEDVGVYYCGQGTQVPYTFGQGTKLEIK

SEQ ID NO: 270 - protein, 112 aa, Artificial
  An artificially generated sequence
DIVMTQSPLSLPVTPGEPASISCRSSQSLVHSNRNTYLHWYQQKPGQAPRLLIYKVSNRFFGVPDRFSGSGSGTDFTLKISRVEAEDVGVYYCGQGTQVPYTFGQGTKLEIK

SEQ ID NO: 271 - protein, 112 aa, Artificial
  An artificially generated sequence
DIVMTQSPLSLPVTPGEPASISCRSSQSLVHSNRNTYLHWYQQKPGQAPRLLIYKVSNRFGGVPDRFSGSGSGTDFTLKISRVEAEDVGVYYCGQGTQVPYTFGQGTKLEIK

SEQ ID NO: 272 - protein, 112 aa, Artificial
  An artificially generated sequence
DIVMTQSPLSLPVTPGEPASISCRSSQSLVHSNRNTYLHWYQQKPGQAPRLLIYKVSNRFHGVPDRFSGSGSGTDFTLKISRVEAEDVGVYYCGQGTQVPYTFGQGTKLEIK

SEQ ID NO: 273 - protein, 112 aa, Artificial
  An artificially generated sequence
DIVMTQSPLSLPVTPGEPASISCRSSQSLVHSNRNTYLHWYQQKPGQAPRLLIYKVSNRFIGVPDRFSGSGSGTDFTLKISRVEAEDVGVYYCGQGTQVPYTFGQGTKLEIK

SEQ ID NO: 274 - protein, 112 aa, Artificial
  An artificially generated sequence
DIVMTQSPLSLPVTPGEPASISCRSSQSLVHSNRNTYLHWYQQKPGQAPRLLIYKVSNRFLGVPDRFSGSGSGTDFTLKISRVEAEDVGVYYCGQGTQVPYTFGQGTKLEIK

SEQ ID NO: 275 - protein, 112 aa, Artificial
  An artificially generated sequence
DIVMTQSPLSLPVTPGEPASISCRSSQSLVHSNRNTYLHWYQQKPGQAPRLLIYKVSNRFMGVPDRFSGSGSGTDFTLKISRVEAEDVGVYYCGQGTQVPYTFGQGTKLEIK

SEQ ID NO: 276 - protein, 112 aa, Artificial
  An artificially generated sequence
DIVMTQSPLSLPVTPGEPASISCRSSQSLVHSNRNTYLHWYQQKPGQAPRLLIYKVSNRFPGVPDRFSGSGSGTDFTLKISRVEAEDVGVYYCGQGTQVPYTFGQGTKLEIK

SEQ ID NO: 277 - protein, 112 aa, Artificial
  An artificially generated sequence
DIVMTQSPLSLPVTPGEPASISCRSSQSLVHSNRNTYLHWYQQKPGQAPRLLIYKVSNRFQGVPDRFSGSGSGTDFTLKISRVEAEDVGVYYCGQGTQVPYTFGQGTKLEIK

SEQ ID NO: 278 - protein, 112 aa, Artificial
  An artificially generated sequence
DIVMTQSPLSLPVTPGEPASISCRSSQSLVHSNRNTYLHWYQQKPGQAPRLLIYKVSNRFRGVPDRFSGSGSGTDFTLKISRVEAEDVGVYYCGQGTQVPYTFGQGTKLEIK

SEQ ID NO: 279 - protein, 112 aa, Artificial
  An artificially generated sequence
DIVMTQSPLSLPVTPGEPASISCRSSQSLVHSNRNTYLHWYQQKPGQAPRLLIYKVSNRFVGVPDRFSGSGSGTDFTLKISRVEAEDVGVYYCGQGTQVPYTFGQGTKLEIK

SEQ ID NO: 280 - protein, 112 aa, Artificial
  An artificially generated sequence
DIVMTQSPLSLPVTPGEPASISCRSSQSLVHSNRNTYLHWYQQKPGQAPRLLIYKVSNRFWGVPDRFSGSGSGTDFTLKISRVEAEDVGVYYCGQGTQVPYTFGQGTKLEIK

SEQ ID NO: 281 - protein, 112 aa, Artificial
  An artificially generated sequence
DIVMTQSPLSLPVTPGEPASISCRSSQSLVHSNRNTYLHWYQQKPGQAPRLLIYKVSNRFSGVPDRFSGSGSGTDFTLKISRVEAEDVGVYYCAQGTQVPYTFGQGTKLEIK

SEQ ID NO: 282 - protein, 112 aa, Artificial
  An artificially generated sequence
DIVMTQSPLSLPVTPGEPASISCRSSQSLVHSNRNTYLHWYQQKPGQAPRLLIYKVSNRFSGVPDRFSGSGSGTDFTLKISRVEAEDVGVYYCEQGTQVPYTFGQGTKLEIK

SEQ ID NO: 283 - protein, 112 aa, Artificial
  An artificially generated sequence
DIVMTQSPLSLPVTPGEPASISCRSSQSLVHSNRNTYLHWYQQKPGQAPRLLIYKVSNRFSGVPDRFSGSGSGTDFTLKISRVEAEDVGVYYCFQGTQVPYTFGQGTKLEIK

SEQ ID NO: 284 - protein, 112 aa, Artificial
  An artificially generated sequence
DIVMTQSPLSLPVTPGEPASISCRSSQSLVHSNRNTYLHWYQQKPGQAPRLLIYKVSNRFSGVPDRFSGSGSGTDFTLKISRVEAEDVGVYYCIQGTQVPYTFGQGTKLEIK

SEQ ID NO: 285 - protein, 112 aa, Artificial
  An artificially generated sequence
DIVMTQSPLSLPVTPGEPASISCRSSQSLVHSNRNTYLHWYQQKPGQAPRLLIYKVSNRFSGVPDRFSGSGSGTDFTLKISRVEAEDVGVYYCLQGTQVPYTFGQGTKLEIK

SEQ ID NO: 286 - protein, 112 aa, Artificial
  An artificially generated sequence
DIVMTQSPLSLPVTPGEPASISCRSSQSLVHSNRNTYLHWYQQKPGQAPRLLIYKVSNRFSGVPDRFSGSGSGTDFTLKISRVEAEDVGVYYCNQGTQVPYTFGQGTKLEIK

SEQ ID NO: 287 - protein, 112 aa, Artificial
  An artificially generated sequence
DIVMTQSPLSLPVTPGEPASISCRSSQSLVHSNRNTYLHWYQQKPGQAPRLLIYKVSNRFSGVPDRFSGSGSGTDFTLKISRVEAEDVGVYYCTQGTQVPYTFGQGTKLEIK

SEQ ID NO: 288 - protein, 112 aa, Artificial
  An artificially generated sequence
DIVMTQSPLSLPVTPGEPASISCRSSQSLVHSNRNTYLHWYQQKPGQAPRLLIYKVSNRFSGVPDRFSGSGSGTDFTLKISRVEAEDVGVYYCVQGTQVPYTFGQGTKLEIK

SEQ ID NO: 289 - protein, 112 aa, Artificial
  An artificially generated sequence
DIVMTQSPLSLPVTPGEPASISCRSSQSLVHSNRNTYLHWYQQKPGQAPRLLIYKVSNRFSGVPDRFSGSGSGTDFTLKISRVEAEDVGVYYCYQGTQVPYTFGQGTKLEIK

SEQ ID NO: 290 - protein, 112 aa, Artificial
  An artificially generated sequence
DIVMTQSPLSLPVTPGEPASISCRSSQSLVHSNRNTYLHWYQQKPGQAPRLLIYKVSNRFSGVPDRFSGSGSGTDFTLKISRVEAEDVGVYYCGQSTQVPYTFGQGTKLEIK

SEQ ID NO: 291 - protein, 112 aa, Artificial
  An artificially generated sequence
DIVMTQSPLSLPVTPGEPASISCRSSQSLVHSNRNTYLHWYQQKPGQAPRLLIYKVSNRFSGVPDRFSGSGSGTDFTLKISRVEAEDVGVYYCGQTTQVPYTFGQGTKLEIK

SEQ ID NO: 292 - protein, 112 aa, Artificial
  An artificially generated sequence
DIVMTQSPLSLPVTPGEPASISCRSSQSLVHSNRNTYLHWYQQKPGQAPRLLIYKVSNRFSGVPDRFSGSGSGTDFTLKISRVEAEDVGVYYCGQGTQFPYTFGQGTKLEIK

SEQ ID NO: 293 - protein, 112 aa, Artificial
  An artificially generated sequence
DIVMTQSPLSLPVTPGEPASISCRSSQSLVHSNRNTYLHWYQQKPGQAPRLLIYKVSNRFSGVPDRFSGSGSGTDFTLKISRVEAEDVGVYYCGQGTQHPYTFGQGTKLEIK

SEQ ID NO: 294 - protein, 112 aa, Artificial
  An artificially generated sequence
DIVMTQSPLSLPVTPGEPASISCRSSQSLVHSNRNTYLHWYQQKPGQAPRLLIYKVSNRFSGVPDRFSGSGSGTDFTLKISRVEAEDVGVYYCGQGTQNPYTFGQGTKLEIK

SEQ ID NO: 295 - protein, 112 aa, Artificial
  An artificially generated sequence
DIVMTQSPLSLPVTPGEPASISCRSSQSLVHSNRNTYLHWYQQKPGQAPRLLIYKVSNRFSGVPDRFSGSGSGTDFTLKISRVEAEDVGVYYCGQGTQPPYTFGQGTKLEIK

SEQ ID NO: 296 - protein, 112 aa, Artificial
  An artificially generated sequence
DIVMTQSPLSLPVTPGEPASISCRSSQSLVHSNRNTYLHWYQQKPGQAPRLLIYKVSNRFSGVPDRFSGSGSGTDFTLKISRVEAEDVGVYYCGQGTQWPYTFGQGTKLEIK

SEQ ID NO: 297 - protein, 112 aa, Artificial
  An artificially generated sequence
DIVMTQSPLSLPVTPGEPASISCRSSQSLVHSNRNTYLHWYQQKPGQAPRLLIYKVSNRFSGVPDRFSGSGSGTDFTLKISRVEAEDVGVYYCGQGTQYPYTFGQGTKLEIK

SEQ ID NO: 298 - protein, 112 aa, Artificial
  An artificially generated sequence
DIVMTQSPLSLPVTPGEPASISCRPSQSPVHSNRNTYLHWYQQKPGQAPRLLIYKVSNRFSGVPDRFSGSGSGTDFTLKISRVEAEDVGVYYCGQGTQVPYTFGQGTKLEIK

SEQ ID NO: 299 - protein, 112 aa, Artificial
  An artificially generated sequence
DIVMTQSPLSLPVTPGEPASISCRSSQPPVHSNRNTYLHWYQQKPGQAPRLLIYKVSNRFSGVPDRFSGSGSGTDFTLKISRVEAEDVGVYYCGQGTQVPYTFGQGTKLEIK

SEQ ID NO: 300 - protein, 112 aa, Artificial
  An artificially generated sequence
DIVMTQSPLSLPVTPGEPASISCRSSQSPVHSNRWTYLHWYQQKPGQAPRLLIYKVSNRFSGVPDRFSGSGSGTDFTLKISRVEAEDVGVYYCGQGTQVPYTFGQGTKLEIK

SEQ ID NO: 301 - protein, 112 aa, Artificial
  An artificially generated sequence
DIVMTQSPLSLPVTPGEPASISCRSSQSPVHSNRNTYIHWYQQKPGQAPRLLIYKVSNRFSGVPDRFSGSGSGTDFTLKISRVEAEDVGVYYCGQGTQVPYTFGQGTKLEIK

SEQ ID NO: 302 - protein, 112 aa, Artificial
  An artificially generated sequence
DIVMTQSPLSLPVTPGEPASISCRSSQSPVHSNRNTYLHWYQQKPGQAPRLLIYKVSNRFRGVPDRFSGSGSGTDFTLKISRVEAEDVGVYYCGQGTQVPYTFGQGTKLEIK

SEQ ID NO: 303 - protein, 112 aa, Artificial
  An artificially generated sequence
DIVMTQSPLSLPVTPGEPASISCRSSQSPVHSNRNTYLHWYQQKPGQAPRLLIYKVSNRFWGVPDRFSGSGSGTDFTLKISRVEAEDVGVYYCGQGTQVPYTFGQGTKLEIK

SEQ ID NO: 304 - protein, 112 aa, Artificial
  An artificially generated sequence
DIVMTQSPLSLPVTPGEPASISCRSSQSPVHSNRNTYLHWYQQKPGQAPRLLIYKVSNRFSGVPDRFSGSGSGTDFTLKISRVEAEDVGVYYCYQGTQVPYTFGQGTKLEIK

SEQ ID NO: 305 - protein, 112 aa, Artificial
  An artificially generated sequence
DIVMTQSPLSLPVTPGEPASISCRSSQSPVHSNRNTYLHWYQQKPGQAPRLLIYKVSNRFRGVPDRFSGSGSGTDFTLKISRVEAEDVGVYYCYQGTQVPYTFGQGTKLEIK

SEQ ID NO: 306 - protein, 112 aa, Artificial
  An artificially generated sequence
DIVMTQSPLSLPVTPGEPASISCRSSQSPVHSNRNTYLHWYQQKPGQAPRLLIYKVSNRFWGVPDRFSGSGSGTDFTLKISRVEAEDVGVYYCYQGTQVPYTFGQGTKLEIK

SEQ ID NO: 307 - protein, 112 aa, Artificial
  An artificially generated sequence
DIVMTQSPLSLPVTPGEPASISCRSSQSPVHSNRNTYIHWYQQKPGQAPRLLIYKVSNRFSGVPDRFSGSGSGTDFTLKISRVEAEDVGVYYCYQGTQVPYTFGQGTKLEIK

SEQ ID NO: 308 - protein, 112 aa, Artificial
  An artificially generated sequence
DIVMTQSPLSLPVTPGEPASISCRSSQSPVHSNRWTYLHWYQQKPGQAPRLLIYKVSNRFSGVPDRFSGSGSGTDFTLKISRVEAEDVGVYYCYQGTQVPYTFGQGTKLEIK

SEQ ID NO: 309 - protein, 112 aa, Artificial
  An artificially generated sequence
DIVMTQSPLSLPVTPGEPASISCRSSQPPVHSNRNTYLHWYQQKPGQAPRLLIYKVSNRFSGVPDRFSGSGSGTDFTLKISRVEAEDVGVYYCYQGTQVPYTFGQGTKLEIK

SEQ ID NO: 310 - protein, 112 aa, Artificial
  An artificially generated sequence
DIVMTQSPLSLPVTPGEPASISCRPSQSPVHSNRNTYLHWYQQKPGQAPRLLIYKVSNRFSGVPDRFSGSGSGTDFTLKISRVEAEDVGVYYCYQGTQVPYTFGQGTKLEIK

SEQ ID NO: 311 - protein, 112 aa, Artificial
  An artificially generated sequence
DIVMTQSPLSLPVTPGEPASISCRSSQSPVHSNRNTYIHWYQQKPGQAPRLLIYKVSNRFRGVPDRFSGSGSGTDFTLKISRVEAEDVGVYYCGQGTQVPYTFGQGTKLEIK

SEQ ID NO: 312 - protein, 112 aa, Artificial
  An artificially generated sequence
DIVMTQSPLSLPVTPGEPASISCRSSQPPVHSNRNTYLHWYQQKPGQAPRLLIYKVSNRFRGVPDRFSGSGSGTDFTLKISRVEAEDVGVYYCGQGTQVPYTFGQGTKLEIK

SEQ ID NO: 313 - protein, 112 aa, Artificial
  An artificially generated sequence
DIVMTQSPLSLPVTPGEPASISCRSSQPPVHSNRNTYIHWYQQKPGQAPRLLIYKVSNRFSGVPDRFSGSGSGTDFTLKISRVEAEDVGVYYCGQGTQVPYTFGQGTKLEIK

SEQ ID NO: 314 - protein, 112 aa, Artificial
  An artificially generated sequence
DIVMTQSPLSLPVTPGEPASISCRSSQPLVHSNRNTYLHWYQQKPGQAPRLLIYKVSNRFRGVPDRFSGSGSGTDFTLKISRVEAEDVGVYYCGQGTQVPYTFGQGTKLEIK

SEQ ID NO: 315 - protein, 112 aa, Artificial
  An artificially generated sequence
DIVMTQSPLSLPVTPGEPASISCRPSQSLVHSNRNTYLHWYQQKPGQAPRLLIYKVSNRFRGVPDRFSGSGSGTDFTLKISRVEAEDVGVYYCGQGTQVPYTFGQGTKLEIK

SEQ ID NO: 316 - protein, 112 aa, Artificial
  An artificially generated sequence
DIVMTQSPLSLPVTPGEPASISCRSSQSLVHSNRNTYLHWYQQKPGQAPRLLIYKVSNRFRGVPDRFSGSGSGTDFTLKISRVEAEDVGVYYCYQGTQVPYTFGQGTKLEIK

SEQ ID NO: 317 - protein, 112 aa, Artificial
  An artificially generated sequence
DIVMTQSPLSLPVTPGEPASISCRSSQSLVHSNRNTYIHWYQQKPGQAPRLLIYKVSNRFRGVPDRFSGSGSGTDFTLKISRVEAEDVGVYYCGQGTQVPYTFGQGTKLEIK

SEQ ID NO: 318 - protein, 112 aa, Artificial
  An artificially generated sequence
DIVMTQSPLSLPVTPGEPASISCRSSQPLVHSNRNTYLHWYQQKPGQAPRLLIYKVSNRFRGVPDRFSGSGSGTDFTLKISRVEAEDVGVYYCYQGTQVPYTFGQGTKLEIK

SEQ ID NO: 319 - protein, 112 aa, Artificial
  An artificially generated sequence
DIVMTQSPLSLPVTPGEPASISCRSSQSPVHSNRNTYIQWYQQKPGQAPRLLIYKVSNRFSGVPDRFSGSGSGTDFTLKISRVEAEDVGVYYCYQGTQVPYTFGQGTKLEIK

SEQ ID NO: 320 - protein, 112 aa, Artificial
  An artificially generated sequence
DIVMTQSPLSLPVTPGEPASISCRSSQSPVHSNRNTYIHWYQQKPGQAPRLLIYKVSNRLSGVPDRFSGSGSGTDFTLKISRVEAEDVGVYYCYQGTQVPYTFGQGTKLEIK

SEQ ID NO: 321 - protein, 112 aa, Artificial
  An artificially generated sequence
DIVMTQSPLSLPVTPGEPASISCRSSQSPVHSNRNTYIHWYQQKPGQAPRLLIYKVSNRFPGVPDRFSGSGSGTDFTLKISRVEAEDVGVYYCYQGTQVPYTFGQGTKLEIK

SEQ ID NO: 322 - protein, 112 aa, Artificial
  An artificially generated sequence
DIVMTQSPLSLPVTPGEPASISCRSSQSPVHSNRNTYIHWYQQKPGQAPRLLIYKVSNRFSGVPDRFSGSGSGTDFTLKISRVEAEDVGVYYCIQGTQVPYTFGQGTKLEIK

SEQ ID NO: 323 - protein, 112 aa, Artificial
  An artificially generated sequence
DIVMTQSPLSLPVTPGEPASISCRSSQSPVHSNRNTYIHWYQQKPGQAPRLLIYKVSNRFSGVPDRFSGSGSGTDFTLKISRVEAEDVGVYYCLQGTQVPYTFGQGTKLEIK

SEQ ID NO: 324 - protein, 112 aa, Artificial
  An artificially generated sequence
DIVMTQSPLSLPVTPGEPASISCRSSQSPVHSNRNTYIHWYQQKPGQAPRLLIYKVSNRFSGVPDRFSGSGSGTDFTLKISRVEAEDVGVYYCVQGTQVPYTFGQGTKLEIK

SEQ ID NO: 325 - protein, 112 aa, Artificial
  An artificially generated sequence
DIVMTQSPLSLPVTPGEPASISCRSSQSPVHSNRNTYIHWYQQKPGQAPRLLIYKVSNRFSGVPDRFSGSGSGTDFTLKISRVEAEDVGVYYCYQSTQVPYTFGQGTKLEIK

SEQ ID NO: 326 - protein, 112 aa, Artificial
  An artificially generated sequence
DIVMTQSPLSLPVTPGEPASISCRSSQSPVHSNRNTYIHWYQQKPGQAPRLLIYKVSNRFSGVPDRFSGSGSGTDFTLKISRVEAEDVGVYYCYQTTQVPYTFGQGTKLEIK

SEQ ID NO: 327 - protein, 112 aa, Artificial
  An artificially generated sequence
DIVMTQSPLSLPVTPGEPASISCRSSQSPVHSNRNTYIHWYQQKPGQAPRLLIYKVSNRFSGVPDRFSGSGSGTDFTLKISRVEAEDVGVYYCYQGTQWPYTFGQGTKLEIK

SEQ ID NO: 328 - protein, 112 aa, Artificial
  An artificially generated sequence
DIVMTQSPLSLPVTPGEPASISCRSSESLVHSNRNTYLHWYQQKPGQAPRLLIYKVSNRFSGVPDRFSGSGSGTDFTLKISRVEAEDVGVYYCGQGTQVPYTFGQGTKLEIK

SEQ ID NO: 329 - protein, 112 aa, Artificial
  An artificially generated sequence
DIVMTQSPLSLPVTPGEPASISCRSSQELVHSNRNTYLHWYQQKPGQAPRLLIYKVSNRFSGVPDRFSGSGSGTDFTLKISRVEAEDVGVYYCGQGTQVPYTFGQGTKLEIK

SEQ ID NO: 330 - protein, 112 aa, Artificial
  An artificially generated sequence
DIVMTQSPLSLPVTPGEPASISCRSSQEPVHSNRNTYLHWYQQKPGQAPRLLIYKVSNRFRGVPDRFSGSGSGTDFTLKISRVEAEDVGVYYCGQGTQVPYTFGQGTKLEIK

SEQ ID NO: 331 - protein, 112 aa, Artificial
  An artificially generated sequence
DIVMTQSPLSLPVTPGEPASISCRSSQEPVHSNRNTYLHWYQQKPGQAPRLLIYKVSNRFSGVPDRFSGSGSGTDFTLKISRVEAEDVGVYYCYQGTQVPYTFGQGTKLEIK

SEQ ID NO: 332 - protein, 112 aa, Artificial
  An artificially generated sequence
DIVMTQSPLSLPVTPGEPASISCRSSQEPVHSNRNTYLHWYQQKPGQAPRLLIYKVSNRFWGVPDRFSGSGSGTDFTLKISRVEAEDVGVYYCYQGTQVPYTFGQGTKLEIK

SEQ ID NO: 333 - protein, 112 aa, Artificial
  An artificially generated sequence
DIVMTQSPLSLPVTPGEPASISCRSSQEPVHSNRNTYIHWYQQKPGQAPRLLIYKVSNRFSGVPDRFSGSGSGTDFTLKISRVEAEDVGVYYCYQGTQVPYTFGQGTKLEIK

SEQ ID NO: 334 - protein, 112 aa, Artificial
  An artificially generated sequence
DIVMTQSPLSLPVTPGEPASISCRSSEPPVHSNRNTYLHWYQQKPGQAPRLLIYKVSNRFSGVPDRFSGSGSGTDFTLKISRVEAEDVGVYYCYQGTQVPYTFGQGTKLEIK

SEQ ID NO: 335 - protein, 112 aa, Artificial
  An artificially generated sequence
DIVMTQSPLSLPVTPGEPASISCRSSESPVHSNRNTYLHWYQQKPGQAPRLLIYKVSNRFRGVPDRFSGSGSGTDFTLKISRVEAEDVGVYYCGQGTQVPYTFGQGTKLEIK

SEQ ID NO: 336 - protein, 112 aa, Artificial
  An artificially generated sequence
DIVMTQSPLSLPVTPGEPASISCRSSESPVHSNRNTYLHWYQQKPGQAPRLLIYKVSNRFSGVPDRFSGSGSGTDFTLKISRVEAEDVGVYYCYQGTQVPYTFGQGTKLEIK

SEQ ID NO: 337 - protein, 112 aa, Artificial
  An artificially generated sequence
DIVMTQSPLSLPVTPGEPASISCRSSESPVHSNRNTYLHWYQQKPGQAPRLLIYKVSNRFWGVPDRFSGSGSGTDFTLKISRVEAEDVGVYYCYQGTQVPYTFGQGTKLEIK

SEQ ID NO: 338 - protein, 112 aa, Artificial
  An artificially generated sequence
DIVMTQSPLSLPVTPGEPASISCRSSESPVHSNRNTYIHWYQQKPGQAPRLLIYKVSNRFSGVPDRFSGSGSGTDFTLKISRVEAEDVGVYYCYQGTQVPYTFGQGTKLEIK

SEQ ID NO: 339 - protein, 112 aa, Artificial
  An artificially generated sequence
DIVMTQSPLSLPVTPGEPASISCRSSEPPVHSNRNTYLHWYQQKPGQAPRLLIYKVSNRFRGVPDRFSGSGSGTDFTLKISRVEAEDVGVYYCGQGTQVPYTFGQGTKLEIK

SEQ ID NO: 340 - protein, 112 aa, Artificial
  An artificially generated sequence
DIVMTQSPLSLPVTPGEPASISCRSSQSPVHSNRNTYIQWYQQKPGQAPRLLIYKVSNRFSGVPDRFSGSGSGTDFTLKISRVEAEDVGVYYCSQGTQVPYTFGQGTKLEIK

SEQ ID NO: 341 - protein, 112 aa, Artificial
  An artificially generated sequence
DIVMTQSPLSLPVTPGEPASISCRSSQSPVHSNRNTYIQWYQQKPGQAPRLLIYKVSNRFSGVPDRFSGSGSGTDFTLKISRVEAEDVGVYYCIQGTQVPYTFGQGTKLEIK

SEQ ID NO: 342 - protein, 112 aa, Artificial
  An artificially generated sequence
DIVMTQSPLSLPVTPGEPASISCRPSQSPVHSNRNTYIQWYQQKPGQAPRLLIYKVSNRFSGVPDRFSGSGSGTDFTLKISRVEAEDVGVYYCYQGTQVPYTFGQGTKLEIK

SEQ ID NO: 343 - protein, 112 aa, Artificial
  An artificially generated sequence
DIVMTQSPLSLPVTPGEPASISCRPSQSPVHSNRNTYIQWYQQKPGQAPRLLIYKVSNRFSGVPDRFSGSGSGTDFTLKISRVEAEDVGVYYCSQGTQVPYTFGQGTKLEIK

SEQ ID NO: 344 - protein, 112 aa, Artificial
  An artificially generated sequence
DIVMTQSPLSLPVTPGEPASISCRPSQSPVHSNRNTYIQWYQQKPGQAPRLLIYKVSNRFSGVPDRFSGSGSGTDFTLKISRVEAEDVGVYYCIQGTQVPYTFGQGTKLEIK

SEQ ID NO: 345 - protein, 112 aa, Artificial
  An artificially generated sequence
DIVMTQSPLSLPVTPGEPASISCRSSQPPVHSNRNTYLHWYQQKPGQAPRLLIYKVSNRFSGVPDRFSGSGSGTDFTLKISRVEAEDVGVYYCTQGTQVPYTFGQGTKLEIK

SEQ ID NO: 346 - protein, 112 aa, Artificial
  An artificially generated sequence
DIVMTQSPLSLPVTPGEPASISCRSSQSPVHSNRNTYIHWYQQKPGQAPRLLIYKVSNRFSGVPDRFSGSGSGTDFTLKISRVEAEDVGVYYCTQGTQVPYTFGQGTKLEIK

SEQ ID NO: 347 - protein, 112 aa, Artificial
  An artificially generated sequence
DIVMTQSPLSLPVTPGEPASISCRPSQSPVHSNRNTYLHWYQQKPGQAPRLLIYKVSNRFSGVPDRFSGSGSGTDFTLKISRVEAEDVGVYYCTQGTQVPYTFGQGTKLEIK

SEQ ID NO: 348 - protein, 112 aa, Artificial
  An artificially generated sequence
DIVMTQSPLSLPVTPGEPASISCRSSQSPVHSNRNTYIQWYQQKPGQAPRLLIYKVSNRFSGVPDRFSGSGSGTDFTLKISRVEAEDVGVYYCTQGTQVPYTFGQGTKLEIK

SEQ ID NO: 349 - protein, 112 aa, Artificial
  An artificially generated sequence
DIVMTQSPLSLPVTPGEPASISCRSSQPPVHSNRNTYLHWYQQKPGQAPRLLIYKVSNRFSGVPDRFSGSGSGTDFTLKISRVEAEDVGVYYCAQGTQVPYTFGQGTKLEIK

SEQ ID NO: 350 - protein, 112 aa, Artificial
  An artificially generated sequence
DIVMTQSPLSLPVTPGEPASISCRSSQSPVHSNRNTYIHWYQQKPGQAPRLLIYKVSNRFSGVPDRFSGSGSGTDFTLKISRVEAEDVGVYYCAQGTQVPYTFGQGTKLEIK

SEQ ID NO: 351 - protein, 112 aa, Artificial
  An artificially generated sequence
DIVMTQSPLSLPVTPGEPASISCRPSQSPVHSNRNTYLHWYQQKPGQAPRLLIYKVSNRFSGVPDRFSGSGSGTDFTLKISRVEAEDVGVYYCAQGTQVPYTFGQGTKLEIK

SEQ ID NO: 352 - protein, 112 aa, Artificial
  An artificially generated sequence
DIVMTQSPLSLPVTPGEPASISCRSSQSPVHSNRNTYIQWYQQKPGQAPRLLIYKVSNRFSGVPDRFSGSGSGTDFTLKISRVEAEDVGVYYCAQGTQVPYTFGQGTKLEIK

SEQ ID NO: 353 - protein, 112 aa, Artificial
  An artificially generated sequence
DIVMTQSPLSLPVTPGEPASISCRSSQPPVHSNRNTYLHWYQQKPGQAPRLLIYKVSNRFSGVPDRFSGSGSGTDFTLKISRVEAEDVGVYYCVQGTQVPYTFGQGTKLEIK

SEQ ID NO: 354 - protein, 112 aa, Artificial
  An artificially generated sequence
DIVMTQSPLSLPVTPGEPASISCRPSQSPVHSNRNTYLHWYQQKPGQAPRLLIYKVSNRFSGVPDRFSGSGSGTDFTLKISRVEAEDVGVYYCVQGTQVPYTFGQGTKLEIK

SEQ ID NO: 355 - protein, 112 aa, Artificial
  An artificially generated sequence
DIVMTQSPLSLPVTPGEPASISCRSSQSPVHSNRNTYIQWYQQKPGQAPRLLIYKVSNRFSGVPDRFSGSGSGTDFTLKISRVEAEDVGVYYCVQGTQVPYTFGQGTKLEIK

SEQ ID NO: 356 - protein, 112 aa, Artificial
  An artificially generated sequence
DIVMTQSPLSLPVTPGEPASISCRSSQSPVHSNRNTYIQWYQQKPGQAPRLLIYKVSNRFSGVPDRFSGSGSGTDFTLKISRVEAEDVGVYYCGQGTQVPYTFGQGTKLEIK

SEQ ID NO: 357 - protein, 112 aa, Artificial
  An artificially generated sequence
DIVMTQSPLSLPVTPGEPASISCRSSQSLVHSNRQTYLHWYQQKPGQAPRLLIYKVSNRFSGVPDRFSGSGSGTDFTLKISRVEAEDVGVYYCGQGTQVPYTFGQGTKLEIK

SEQ ID NO: 358 - protein, 112 aa, Artificial
  An artificially generated sequence
DIVMTQSPLSLPVTPGEPASISCRSSQPPVHSNRQTYLHWYQQKPGQAPRLLIYKVSNRFSGVPDRFSGSGSGTDFTLKISRVEAEDVGVYYCGQGTQVPYTFGQGTKLEIK

SEQ ID NO: 359 - protein, 112 aa, Artificial
  An artificially generated sequence
DIVMTQSPLSLPVTPGEPASISCRSSQPLVHSNRQTYLHWYQQKPGQAPRLLIYKVSNRFSGVPDRFSGSGSGTDFTLKISRVEAEDVGVYYCGQGTQVPYTFGQGTKLEIK

SEQ ID NO: 360 - protein, 112 aa, Artificial
  An artificially generated sequence
DIVMTQSPLSLPVTPGEPASISCQASESLVHSNRNTYLHWYQQKPGQAPRLLIYKVSNRFSGVPDRFSGSGSGTDFTLKISRVEAEDVGVYYCGQGTQVPYTFGQGTKLEIK

SEQ ID NO: 361 - protein, 112 aa, Artificial
  An artificially generated sequence
DIVMTQSPLSLPVTPGEPASISCRSSQSLVHSNRNTYLHWYLQKPGQSPQLLIYKVSNRFSGVPDRFSGSGSGTDFTLKISRVEAEDVGVYYCGQGTQVPYTFGQGTKLEIK

SEQ ID NO: 362 - protein, 112 aa, Artificial
  An artificially generated sequence
DIVMTQSPLSLPVTPGEPASISCRSSQSLVHSNRNTYLHWYQQKPGQAPRLLIYKVSNRFSGVPDRFSGSGSGTDFTLKISRVEAEDVGVYYCGQGTQVPYTFGQGTKVEIE

SEQ ID NO: 363 - protein, 112 aa, Artificial
  An artificially generated sequence
DIVMTQSPLSLPVTPGEPASISCQASESLVHSNRNTYLHWYQQKPGQAPRLLIYKVSNRFSGVPDRFSGSGSGTDFTLKISRVEAEDVGVYYCGQGTQVPYTFGQGTKVEIE

SEQ ID NO: 364 - protein, 112 aa, Artificial
  An artificially generated sequence
DIVMTQSPLSLPVTPGEPASISCRSSQSLVHSNRNTYLHWYLQKPGQSPQLLIYKVSNRFSGVPDRFSGSGSGTDFTLKISRVEAEDVGVYYCGQGTQVPYTFGQGTKVEIE

SEQ ID NO: 365 - protein, 112 aa, Artificial
  An artificially generated sequence
DIVMTQSPLSLPVTPGEPASISCQASESLVHSNRNTYLHWYLQKPGQSPQLLIYKVSNRFSGVPDRFSGSGSGTDFTLKISRVEAEDVGVYYCGQGTQVPYTFGQGTKVEIE

SEQ ID NO: 366 - protein, 112 aa, Artificial
  An artificially generated sequence
DIVMTQSPLSLPVTPGEPASISCQASESLVHSNRNTYLHWYLQKPGQSPQLLIYKVSNRFSGVPDRFSGSGSGTDFTLKISRVEAEDVGVYYCGQGTQVPYTFGQGTKLEIK

SEQ ID NO: 367 - protein, 112 aa, Artificial
  An artificially generated sequence
DIVMTQSPLSLPVTPGEPASISCQASESLVHSNRNTYLHWYQQKPGQAPRLLIYKVSNRFRGVPDRFSGSGSGTDFTLKISRVEAEDVGVYYCGQGTQVPYTFGQGTKLEIK

SEQ ID NO: 368 - protein, 112 aa, Artificial
  An artificially generated sequence
DIVMTQSPLSLPVTPGEPASISCRSSQSLVHSNRNTYLHWYLQKPGQSPQLLIYKVSNRFRGVPDRFSGSGSGTDFTLKISRVEAEDVGVYYCGQGTQVPYTFGQGTKLEIK

SEQ ID NO: 369 - protein, 112 aa, Artificial
  An artificially generated sequence
DIVMTQSPLSLPVTPGEPASISCRSSQSLVHSNRNTYLHWYQQKPGQAPRLLIYKVSNRFRGVPDRFSGSGSGTDFTLKISRVEAEDVGVYYCGQGTQVPYTFGQGTKVEIE

SEQ ID NO: 370 - protein, 112 aa, Artificial
  An artificially generated sequence
DIVMTQSPLSLPVTPGEPASISCQASESLVHSNRNTYLHWYQQKPGQAPRLLIYKVSNRFRGVPDRFSGSGSGTDFTLKISRVEAEDVGVYYCGQGTQVPYTFGQGTKVEIE

SEQ ID NO: 371 - protein, 112 aa, Artificial
  An artificially generated sequence
DIVMTQSPLSLPVTPGEPASISCRSSQSLVHSNRNTYLHWYLQKPGQSPQLLIYKVSNRFRGVPDRFSGSGSGTDFTLKISRVEAEDVGVYYCGQGTQVPYTFGQGTKVEIE

SEQ ID NO: 372 - protein, 112 aa, Artificial
  An artificially generated sequence
DIVMTQSPLSLPVTPGEPASISCQASESLVHSNRNTYLHWYLQKPGQSPQLLIYKVSNRFRGVPDRFSGSGSGTDFTLKISRVEAEDVGVYYCGQGTQVPYTFGQGTKVEIE

SEQ ID NO: 373 - protein, 112 aa, Artificial
  An artificially generated sequence
DIVMTQSPLSLPVTPGEPASISCRSSQSPVHSNRNTYLHWYLQKPGQSPQLLIYKVSNRFSGVPDRFSGSGSGTDFTLKISRVEAEDVGVYYCGQGTQVPYTFGQGTKLEIK

SEQ ID NO: 374 - protein, 112 aa, Artificial
  An artificially generated sequence
DIVMTQSPLSLPVTPGEPASISCRSSQSPVHSNRNTYLHWYLQKPGQSPQLLIYKVSNRFSGVPDRFSGSGSGTDFTLKISRVEAEDVGVYYCYQGTQVPYTFGQGTKLEIK

SEQ ID NO: 375 - protein, 112 aa, Artificial
  An artificially generated sequence
DIVMTQSPLSLPVTPGEPASISCRSSQSPVHSNRNTYIQWYLQKPGQSPQLLIYKVSNRFSGVPDRFSGSGSGTDFTLKISRVEAEDVGVYYCYQGTQVPYTFGQGTKLEIK

SEQ ID NO: 376 - protein, 112 aa, Artificial
  An artificially generated sequence
DIVMTQSPLSLPVTPGEPASISCQASESPVHSNRNTYLHWYLQKPGQSPQLLIYKVSNRFSGVPDRFSGSGSGTDFTLKISRVEAEDVGVYYCGQGTQVPYTFGQGTKLEIK

SEQ ID NO: 377 - protein, 112 aa, Artificial
  An artificially generated sequence
DIVMTQSPLSLPVTPGEPASISCQASESPVHSNRNTYLHWYLQKPGQSPQLLIYKVSNRFSGVPDRFSGSGSGTDFTLKISRVEAEDVGVYYCYQGTQVPYTFGQGTKLEIK

SEQ ID NO: 378 - protein, 112 aa, Artificial
  An artificially generated sequence
DIVMTQSPLSLPVTPGEPASISCQASESPVHSNRNTYIQWYLQKPGQSPQLLIYKVSNRFSGVPDRFSGSGSGTDFTLKISRVEAEDVGVYYCYQGTQVPYTFGQGTKLEIK

SEQ ID NO: 379 - protein, 112 aa, Artificial
  An artificially generated sequence
DIVMTQSPLSLPVTPGEPASISCRSSQSPVHSNRNTYLHWYLQKPGQSPQLLIYKVSNRFSGVPDRFSGSGSGTDFTLKISRVEAEDVGVYYCTQGTQVPYTFGQGTKLEIK

SEQ ID NO: 380 - protein, 112 aa, Artificial
  An artificially generated sequence
DIVMTQSPLSLPVTPGEPASISCQASESPVHSNRNTYLHWYLQKPGQSPQLLIYKVSNRFSGVPDRFSGSGSGTDFTLKISRVEAEDVGVYYCTQGTQVPYTFGQGTKLEIK

SEQ ID NO: 381 - protein, 458 aa, Artificial
  An artificially generated sequence
QVQLVESGGGVVQPGRSLRLSCAASGFTFSNAWMHWVRQAPGKGLEWVANIKAKSNNYATYYAESVKGRFTISRDDSKNSLYLQMNSLKTEDTAVYYCRYVHYGAYYGVDAWGQGTTVTVSSASTKGPSVFPLAPSSKSTSGGTAALGCLVKDYFPEPVTVSWNSGALTSGVHTFPAVLQSSGLYSLSSVVTVPSSSLGTQTYICNVNHKPSNTKVDKKVEPKSCDKTHTCPPCPAPEAAGGPSVFLFPPKPKDTLMISRTPEVTCVVVDVSHEDPEVKFNWYVDGVEVHNAKTKPREEQYASTYRVVSVLTVLHQDWLNGKEYKCKVSNKALPAPIEKTISKAKGQPREPQVYTLPPSRCELTKNQVSLSCAVKGFYPSDIAVEWESNGQPENNYKTTPPVLDSDGSFFLVSKLTVDKSRWQQGNVFSCSVMHEALHNHYTQKSLSLSPDYKDDDDK

SEQ ID NO: 382 - protein, 458 aa, Artificial
  An artificially generated sequence
QVQLVESGGGVVQPGRSLRLSCAASGFTFSNAWMHWVRQAPGKGLEWVAQIKAKSNNYATYYAESVKGRFTISRDDSKNSLYLQMNSLKTEDTAVYYCRYVHYYAYYGVQAWGQGTTVTVSSASTKGPSVFPLAPSSKSTSGGTAALGCLVKDYFPEPVTVSWNSGALTSGVHTFPAVLQSSGLYSLSSVVTVPSSSLGTQTYICNVNHKPSNTKVDKKVEPKSCDKTHTCPPCPAPEAAGGPSVFLFPPKPKDTLMISRTPEVTCVVVDVSHEDPEVKFNWYVDGVEVHNAKTKPREEQYASTYRVVSVLTVLHQDWLNGKEYKCKVSNKALPAPIEKTISKAKGQPREPQVYTLPPSRCELTKNQVSLSCAVKGFYPSDIAVEWESNGQPENNYKTTPPVLDSDGSFFLVSKLTVDKSRWQQGNVFSCSVMHEALHNHYTQKSLSLSPDYKDDDDK

SEQ ID NO: 383 - protein, 458 aa, Artificial
  An artificially generated sequence
QVQLVESGGGVVQPGRSLRLSCAASGFTFSNAWMHWVRQAPGKGLEWVAQIKAKSNNYATYYAESVKGRFTISRDDSKNSLYLQMNSLKTEDTAVYYCRYVHYYYYYGVDAWGQGTTVTVSSASTKGPSVFPLAPSSKSTSGGTAALGCLVKDYFPEPVTVSWNSGALTSGVHTFPAVLQSSGLYSLSSVVTVPSSSLGTQTYICNVNHKPSNTKVDKKVEPKSCDKTHTCPPCPAPEAAGGPSVFLFPPKPKDTLMISRTPEVTCVVVDVSHEDPEVKFNWYVDGVEVHNAKTKPREEQYASTYRVVSVLTVLHQDWLNGKEYKCKVSNKALPAPIEKTISKAKGQPREPQVYTLPPSRCELTKNQVSLSCAVKGFYPSDIAVEWESNGQPENNYKTTPPVLDSDGSFFLVSKLTVDKSRWQQGNVFSCSVMHEALHNHYTQKSLSLSPDYKDDDDK

SEQ ID NO: 384 - protein, 440 aa, Artificial
  An artificially generated sequence
QVQLVQSGAEVKKPGASVTVSCKASGYTFTDYEMHWIRQPPGEGLEWIGAIDGETPDTAYSEKFKGRVTLTADKSTSTAYMELSSLTSEDTAVYYCTRFYSYTYWGQGTLVTVSSASTKGPSVFPLAPCSRSTSESTAALGCLVKDYFPEPVTVSWNSGALTSGVHTFPAVLQSSGLYSLSSVVTVPSSSLGTQTYTCNVDHKPSNTKVDKRVESKYGPPCPPCPAPEFRGGPKVFLFPPKPKDTLMISRTPEVTCVVVDVSQEDPEVQFNWYVDGVEVHNAKTKPREEQFASTYRVVSVLTVLHQDWLNGKEYKCKVSNKGLPSSIEKTISKAKGQPREPQVYTLPPSQEEMTKNQVSLTCLVKGFYPSDIAVEWESNGQPENNYKTTPPVLDSDGSFFLYSKLTVDKSRWQEGNVFSCSVMHEALHNHYTQESLSLSP

SEQ ID NO: 385 - protein, 440 aa, Artificial
  An artificially generated sequence
QVQLVQSGAEVKKPGASVTVSCKASGYTFTDYEMHWIRQPPGEGLEWIGAIDGPTPDTAYSEKFKGRVTLTADKSTSTAYMELSSLTSEDTAVYYCTRFYSYTYWGQGTLVTVSSASTKGPSVFPLAPCSRSTSESTAALGCLVKDYFPEPVTVSWNSGALTSGVHTFPAVLQSSGLYSLSSVVTVPSSSLGTQTYTCNVDHKPSNTKVDKRVESKYGPPCPPCPAPEFRGGPKVFLFPPKPKDTLMISRTPEVTCVVVDVSQEDPEVQFNWYVDGVEVHNAKTKPREEQFASTYRVVSVLTVLHQDWLNGKEYKCKVSNKGLPSSIEKTISKAKGQPREPQVYTLPPSQEEMTKNQVSLTCLVKGFYPSDIAVEWESNGQPENNYKTTPPVLDSDGSFFLYSKLTVDKSRWQEGNVFSCSVMHEALHNHYTQESLSLSP

SEQ ID NO: 386 - protein, 440 aa, Artificial
  An artificially generated sequence
QVQLVQSGAEVKKPGASVTVSCKASGYTFTDYEMHWVRQAPGEGLEWMGAIDGETPDTAYSEKFKGRVTLTADKSTSTAYMELSSLTSEDTAVYYCTRFYSYTYWGQGTLVTVSSASTKGPSVFPLAPCSRSTSESTAALGCLVKDYFPEPVTVSWNSGALTSGVHTFPAVLQSSGLYSLSSVVTVPSSSLGTQTYTCNVDHKPSNTKVDKRVESKYGPPCPPCPAPEFRGGPKVFLFPPKPKDTLMISRTPEVTCVVVDVSQEDPEVQFNWYVDGVEVHNAKTKPREEQFASTYRVVSVLTVLHQDWLNGKEYKCKVSNKGLPSSIEKTISKAKGQPREPQVYTLPPSQEEMTKNQVSLTCLVKGFYPSDIAVEWESNGQPENNYKTTPPVLDSDGSFFLYSKLTVDKSRWQEGNVFSCSVMHEALHNHYTQESLSLSP

SEQ ID NO: 387 - protein, 440 aa, Artificial
  An artificially generated sequence
QVQLVQSGAEVKKPGASVKVSCKASGYTFTDYEMHWIRQPPGQGLEWIGAIDGKTPDTAYSQKFKGRVTLTADKSTSTAYMELSSLTSEDTAVYYCTRFYSYTYWGQGTLVTVSSASTKGPSVFPLAPCSRSTSESTAALGCLVKDYFPEPVTVSWNSGALTSGVHTFPAVLQSSGLYSLSSVVTVPSSSLGTQTYTCNVDHKPSNTKVDKRVESKYGPPCPPCPAPEFRGGPKVFLFPPKPKDTLMISRTPEVTCVVVDVSQEDPEVQFNWYVDGVEVHNAKTKPREEQFASTYRVVSVLTVLHQDWLNGKEYKCKVSNKGLPSSIEKTISKAKGQPREPQVYTLPPSQEEMTKNQVSLTCLVKGFYPSDIAVEWESNGQPENNYKTTPPVLDSDGSFFLYSKLTVDKSRWQEGNVFSCSVMHEALHNHYTQESLSLSP

SEQ ID NO: 388 - protein, 458 aa, Artificial
  An artificially generated sequence
QVQLVESGGGVVQPGRSLRLSCAASGFTFSNAWMHWVRQAPGKGLEWVAQIKAKSNNYATYYAESVKGRFTISRDDSKNSLYLQMNSLKTEDTAVYYCRYVHYGAYYGVDAWGQGTTVTVSSASTKGPSVFPLAPSSKSTSGGTAALGCLVKDYFPEPVTVSWNSGALTSGVHTFPAVLQSSGLYSLSSVVTVPSSSLGTQTYICNVNHKPSNTKVDKKVEPKSCDKTHTCPPCPAPEAAGGPSVFLFPPKPKDTLMISRTPEVTCVVVDVSHEDPEVKFNWYVDGVEVHNAKTKPREEQYASTYRVVSVLTVLHQDWLNGKEYKCKVSNKALPAPIEKTISKAKGQPREPQVYTLPPSRCELTKNQVSLSCAVKGFYPSDIAVEWESNGQPENNYKTTPPVLDSDGSFFLVSKLTVDKSRWQQGNVFSCSVMHEALHNHYTQKSLSLSPDYKDDDDK

SEQ ID NO: 389 - protein, 458 aa, Artificial; identical to SEQ ID NO: 49
  An artificially generated sequence

SEQ ID NO: 390 - protein, 447 aa, Artificial
  An artificially generated sequence
EVQLVETGGSLVQPGKSLKLTCATSGFTFSNAWMHWVRQSPEKQLEWVAQIKAKSNNYATYYAESVKGRFTISRDDSKSNIYLQMNSLKEEDTAVYYCRYVHYGAYYGVDAWGQGTSVTVSSASTKGPSVFPLAPCSRSTSESTAALGCLVKDYFPEPVTVSWNSGALTSGVHTFPAVLQSSGLYSLSSVVTVPSSSLGTKTYTCNVDHKPSNTKVDKRVESKYGPPCPPCPAPEFRGGPKVFLFPPKPKDTLMISRTPEVTCVVVDVSQEDPEVQFNWYVDGVEVHNAKTKPREEQFASTYRVVSVLTVLHQDWLNGKEYKCKVSNKGLPSSIEKTISKAKGQPREPQVYTLPPSQKEMTKNQVSLTCLVKGFYPSDIAVEWESNGQPENNYKTTPPVLDSDGSFFLYSKLTVDKSRWQEGNVFSCSVMHEALHNRYTQKSLSLSP

SEQ ID NO: 391 - protein, 458 aa, Artificial
  An artificially generated sequence
QVQLVESGGGVVQPGRSLRLSCAASGFTFSNAWMHWVRQAPGKGLEWVAQIKAKSNNYKKYYAESVKGRFTISRDDSKNSLYLQMNSLKTEDTAVYYCRYVHYYYYYGVQAWGQGTTVTVSSASTKGPSVFPLAPSSKSTSGGTAALGCLVKDYFPEPVTVSWNSGALTSGVHTFPAVLQSSGLYSLSSVVTVPSSSLGTQTYICNVNHKPSNTKVDKKVEPKSCDKTHTCPPCPAPEAAGGPSVFLFPPKPKDTLMISRTPEVTCVVVDVSHEDPEVKFNWYVDGVEVHNAKTKPREEQYASTYRVVSVLTVLHQDWLNGKEYKCKVSNKALPAPIEKTISKAKGQPREPQVYTLPPSRCELTKNQVSLSCAVKGFYPSDIAVEWESNGQPENNYKTTPPVLDSDGSFFLVSKLTVDKSRWQQGNVFSCSVMHEALHNHYTQKSLSLSPDYKDDDDK

SEQ ID NO: 392 - protein, 458 aa, Artificial
  An artificially generated sequence
QVQLVESGGGLVQPGRSLRLSCAASGFTFSNAWMHWVRQAPGKGLEWVAQIKGKSNNYATYYAESVKGRFTISRADSKNSIYLQMNSLKTEDTAVYYCRYVHYSASYGVDIWGQGTTVTVSSASTKGPSVFPLAPSSKSTSGGTAALGCLVKDYFPEPVTVSWNSGALTSGVHTFPAVLQSSGLYSLSSVVTVPSSSLGTQTYICNVNHKPSNTKVDKKVEPKSCDKTHTCPPCPAPEAAGGPSVFLFPPKPKDTLMISRTPEVTCVVVDVSHEDPEVKFNWYVDGVEVHNAKTKPREEQYASTYRVVSVLTVLHQDWLNGKEYKCKVSNKALPAPIEKTISKAKGQPREPQVYTLPPSRCELTKNQVSLSCAVKGFYPSDIAVEWESNGQPENNYKTTPPVLDSDGSFFLVSKLTVDKSRWQQGNVFSCSVMHEALHNHYTQKSLSLSPDYKDDDDK

SEQ ID NO: 393 - protein, 447 aa, Artificial
  An artificially generated sequence
QVQLVESGGGLVQPGRSLRLSCAASGFTFSNAWMHWVRQAPGKGLEWVAQIKDKSQNYATYYAESVKGRFTISRADSKNSIYLQMNSLKTEDTAVYYCRYVHYSASYGVDAWGQGTTVTVSSASTKGPSVFPLAPCSRSTSESTAALGCLVKDYFPEPVTVSWNSGALTSGVHTFPAVLQSSGLYSLSSVVTVPSSSLGTKTYTCNVDHKPSNTKVDKRVESKYGPPCPPCPAPEFRGGPKVFLFPPKPKDTLMISRTPEVTCVVVDVSQEDPEVQFNWYVDGVEVHNAKTKPREEQFASTYRVVSVLTVLHQDWLNGKEYKCKVSNKGLPSSIEKTISKAKGQPREPQVYTLPPSQKEMTKNQVSLTCLVKGFYPSDIAVEWESNGQPENNYKTTPPVLDSDGSFFLYSKLTVDKSRWQEGNVFSCSVMHEALHNRYTQKSLSLSP

SEQ ID NO: 394 - protein, 447 aa, Artificial
  An artificially generated sequence
QVQLVESGGGLVQPGRSLRLSCAASGFTFSNAWMHWVRQAPGKGLEWVAQIKDKSQNYATYYAESVKGRFTISRADSKNSIYLQMNSLKTEDTAVYYCRYVHYAASYGVDIWGQGTTVTVSSASTKGPSVFPLAPCSRSTSESTAALGCLVKDYFPEPVTVSWNSGALTSGVHTFPAVLQSSGLYSLSSVVTVPSSSLGTKTYTCNVDHKPSNTKVDKRVESKYGPPCPPCPAPEFRGGPKVFLFPPKPKDTLMISRTPEVTCVVVDVSQEDPEVQFNWYVDGVEVHNAKTKPREEQFASTYRVVSVLTVLHQDWLNGKEYKCKVSNKGLPSSIEKTISKAKGQPREPQVYTLPPSQKEMTKNQVSLTCLVKGFYPSDIAVEWESNGQPENNYKTTPPVLDSDGSFFLYSKLTVDKSRWQEGNVFSCSVMHEALHNRYTQKSLSLSP

SEQ ID NO: 395 - protein, 447 aa, Artificial
  An artificially generated sequence
QVQLVESGGGLVQPGRSLRLSCAASGFTFSNAWMHWVRQAPGKGLEWVAQIKDKSQNYATYYAESVKGRFTISRDDSKNSLYLQMNSLKTEDTAVYYCRYVHYAASYGVDAWGQGTTVTVSSASTKGPSVFPLAPCSRSTSESTAALGCLVKDYFPEPVTVSWNSGALTSGVHTFPAVLQSSGLYSLSSVVTVPSSSLGTKTYTCNVDHKPSNTKVDKRVESKYGPPCPPCPAPEFRGGPKVFLFPPKPKDTLMISRTPEVTCVVVDVSQEDPEVQFNWYVDGVEVHNAKTKPREEQFASTYRVVSVLTVLHQDWLNGKEYKCKVSNKGLPSSIEKTISKAKGQPREPQVYTLPPSQKEMTKNQVSLTCLVKGFYPSDIAVEWESNGQPENNYKTTPPVLDSDGSFFLYSKLTVDKSRWQEGNVFSCSVMHEALHNRYTQKSLSLSP

SEQ ID NO: 396 - protein, 447 aa, Artificial
  An artificially generated sequence
QVQLVESGGGVVQPGGSLRLSCAASGFTFSNAWMHWVRQAPGKGLEWVAQIKDKSQNYATYYAESVKGRFTISRDDSKNSLYLQMNSLKTEDTAVYYCRYVHYAASYGVDAWGQGTTVTVSSASTKGPSVFPLAPCSRSTSESTAALGCLVKDYFPEPVTVSWNSGALTSGVHTFPAVLQSSGLYSLSSVVTVPSSSLGTKTYTCNVDHKPSNTKVDKRVESKYGPPCPPCPAPEFRGGPKVFLFPPKPKDTLMISRTPEVTCVVVDVSQEDPEVQFNWYVDGVEVHNAKTKPREEQFASTYRVVSVLTVLHQDWLNGKEYKCKVSNKGLPSSIEKTISKAKGQPREPQVYTLPPSQKEMTKNQVSLTCLVKGFYPSDIAVEWESNGQPENNYKTTPPVLDSDGSFFLYSKLTVDKSRWQEGNVFSCSVMHEALHNRYTQKSLSLSP

SEQ ID NO: 397 - protein, 447 aa, Artificial
  An artificially generated sequence
QVQLVESGGGLVQPGRSLRLSCAASGFTFSNAWMHWVRQAPGKGLEWVAQIKDKSNNYATYYAESVKGRFTISRADSKNSIYLQMNSLKTEDTAVYYCRYVHYAASYGVDIWGQGTTVTVSSASTKGPSVFPLAPCSRSTSESTAALGCLVKDYFPEPVTVSWNSGALTSGVHTFPAVLQSSGLYSLSSVVTVPSSSLGTKTYTCNVDHKPSNTKVDKRVESKYGPPCPPCPAPEFRGGPKVFLFPPKPKDTLMISRTPEVTCVVVDVSQEDPEVQFNWYVDGVEVHNAKTKPREEQFASTYRVVSVLTVLHQDWLNGKEYKCKVSNKGLPSSIEKTISKAKGQPREPQVYTLPPSQKEMTKNQVSLTCLVKGFYPSDIAVEWESNGQPENNYKTTPPVLDSDGSFFLYSKLTVDKSRWQEGNVFSCSVMHEALHNRYTQKSLSLSP

SEQ ID NO: 398 - protein, 447 aa, Artificial
  An artificially generated sequence
QVQLVESGGGLVQPGRSLRLSCAASGFTFSNAWMHWVRQAPGKGLEWVAQIKDKSQNYATYYAESVKGRFTISRDDSKNSLYLQMNSLKTEDTAVYYCRYVHYAAGYGVDAWGQGTTVTVSSASTKGPSVFPLAPCSRSTSESTAALGCLVKDYFPEPVTVSWNSGALTSGVHTFPAVLQSSGLYSLSSVVTVPSSSLGTKTYTCNVDHKPSNTKVDKRVESKYGPPCPPCPAPEFRGGPKVFLFPPKPKDTLMISRTPEVTCVVVDVSQEDPEVQFNWYVDGVEVHNAKTKPREEQFASTYRVVSVLTVLHQDWLNGKEYKCKVSNKGLPSSIEKTISKAKGQPREPQVYTLPPSQKEMTKNQVSLTCLVKGFYPSDIAVEWESNGQPENNYKTTPPVLDSDGSFFLYSKLTVDKSRWQEGNVFSCSVMHEALHNRYTQKSLSLSP

SEQ ID NO: 399 - protein, 447 aa, Artificial
  An artificially generated sequence
QVQLVESGGGVVQPGGSLRLSCAASGFTFSNAWMHWVRQAPGKGLEWVAQIKDKSQNYATYYAESVKGRFTISRADSKNSIYLQMNSLKTEDTAVYYCRYVHYAAGYGVDIWGQGTTVTVSSASTKGPSVFPLAPCSRSTSESTAALGCLVKDYFPEPVTVSWNSGALTSGVHTFPAVLQSSGLYSLSSVVTVPSSSLGTKTYTCNVDHKPSNTKVDKRVESKYGPPCPPCPAPEFRGGPKVFLFPPKPKDTLMISRTPEVTCVVVDVSQEDPEVQFNWYVDGVEVHNAKTKPREEQFASTYRVVSVLTVLHQDWLNGKEYKCKVSNKGLPSSIEKTISKAKGQPREPQVYTLPPSQKEMTKNQVSLTCLVKGFYPSDIAVEWESNGQPENNYKTTPPVLDSDGSFFLYSKLTVDKSRWQEGNVFSCSVMHEALHNRYTQKSLSLSP

SEQ ID NO: 400 - protein, 447 aa, Artificial
  An artificially generated sequence
QVQLVESGGGLVQPGRSLRLSCAASGFTFSNAWMHWVRQAPGKGLEWVAQIKDKSQNYATYVAESVKGRFTISRDDSKNSLYLQMNSLKTEDTAVYYCRYVHYAAGYGVDAWGQGTTVTVSSASTKGPSVFPLAPCSRSTSESTAALGCLVKDYFPEPVTVSWNSGALTSGVHTFPAVLQSSGLYSLSSVVTVPSSSLGTKTYTCNVDHKPSNTKVDKRVESKYGPPCPPCPAPEFRGGPKVFLFPPKPKDTLMISRTPEVTCVVVDVSQEDPEVQFNWYVDGVEVHNAKTKPREEQFASTYRVVSVLTVLHQDWLNGKEYKCKVSNKGLPSSIEKTISKAKGQPREPQVYTLPPSQKEMTKNQVSLTCLVKGFYPSDIAVEWESNGQPENNYKTTPPVLDSDGSFFLYSKLTVDKSRWQEGNVFSCSVMHEALHNRYTQKSLSLSP

SEQ ID NO: 401 - protein, 447 aa, Artificial
  An artificially generated sequence
QVQLVESGGGVVQPGGSLRLSCAASGFTFSNAWMHWVRQAPGKGLEWVAQIKDKSQNYATYVAESVKGRFTISRADSKNSIYLQMNSLKTEDTAVYYCRYVHYAAGYGVDIWGQGTTVTVSSASTKGPSVFPLAPCSRSTSESTAALGCLVKDYFPEPVTVSWNSGALTSGVHTFPAVLQSSGLYSLSSVVTVPSSSLGTKTYTCNVDHKPSNTKVDKRVESKYGPPCPPCPAPEFRGGPKVFLFPPKPKDTLMISRTPEVTCVVVDVSQEDPEVQFNWYVDGVEVHNAKTKPREEQFASTYRVVSVLTVLHQDWLNGKEYKCKVSNKGLPSSIEKTISKAKGQPREPQVYTLPPSQKEMTKNQVSLTCLVKGFYPSDIAVEWESNGQPENNYKTTPPVLDSDGSFFLYSKLTVDKSRWQEGNVFSCSVMHEALHNRYTQKSLSLSP

SEQ ID NO: 402 - protein, 447 aa, Artificial
  An artificially generated sequence
QVQLVESGGGVVQPGGSLRLSCAASGFTFSNAWMHWVRQAPGKGLEWVAQIKDKSQNYATYVAESVKGRFTISRADSKNSIYLQMNSLKTEDTAVYYCRYVHYAAGYGVDIWGQGTTVTVSSASTKGPSVFPLAPCSRSTSESTAALGCLVKDYFPEPVTVSWNSGALTSGVHTFPAVLQSSGLYSLSSVVTVPSSSLGTKTYTCNVDHKPSNTKVDKRVESKYGPPCPPCPAPEFRGGPKVFLFPPKPKDTLMISRTPEVTCVVVDVSQEDPEVQFNWYVDGVEVHNAKTKPREEQFASTYRVVSVLTVLHQDWLNGKEYKCKVSNKGLPSSIEKTISKAKGQPREPQVYTLPPSQKEMTKNQVSLTCLVKGFYPSDIAVEWESNGQPENNYKTTPPVLDSDGSFFLYSKLTVDKSRWQEGNVFSCSVMHEALHNHYTQKSLSLSP

SEQ ID NO: 403 - protein, 450 aa, Artificial; identical to SEQ ID NO: 47
  An artificially generated sequence

SEQ ID NO: 404 - protein, 450 aa, Artificial
  An artificially generated sequence
DIVMTQSPLSLPVTPGEPASISCRSSQSLVHSNRNTYLHWYQQKPGQAPRLLIYKVSNRFSGVPDRFSGSGSGTDFTLKISRVEAEDVGVYYCGQGTQVPYTFGQGTKLEIKSSASTKGPSVFPLAPSSKSTSGGTAALGCLVKDYFPEPVTVSWNSGALTSGVHTFPAVLQSSGLYSLSSVVTVPSSSLGTQTYICNVNHKPSNTKVDKKVEPKSCDKTHTCPPCPAPEAAGGPSVFLFPPKPKDTLMISRTPEVTCVVVDVSHEDPEVKFNWYVDGVEVHNAKTKPREEQYASTYRVVSVLTVLHQDWLNGKEYKCKVSNKALPAPIEKTISKAKGQPREPQVCTLPPSRDELTKNQVSLWCLVKGFYPSDIAVEWESNGQPENNYKTTPPVLDSDGSFFLYSKLTVDKSRWQQGNVFSCSVMHEALHNHYTQKSLSLSPHHHHHHHH

SEQ ID NO: 405 - protein, 222 aa, Artificial; identical to SEQ ID NO: 48
  An artificially generated sequence

SEQ ID NO: 406 - protein, 222 aa, Artificial
  An artificially generated sequence
QVQLVQSGAEVKKPGASVKVSCKASGYTFTDYEMHWIRQPPGQGLEWIGAIDGKTPDTAYSQKFKGRVTLTADKSTSTAYMELSSLTSEDTAVYYCTRFYSYTYWGQGTLVTVSSASVAAPSVFIFPPSDEQLKSGTASVVCLLNNFYPREAKVQWKVDNALQSGNSQESVTEQDSKDSTYSLSSTLTLSKADYEKHKVYACEVTHQGLSSPVTKSFNRGEC

SEQ ID NO: 407 - protein, 219 aa, Artificial; identical to SEQ ID NO: 50
  An artificially generated sequence

SEQ ID NO: 408 - protein, 219 aa, Artificial
  An artificially generated sequence
DIVMTQSPLSLPVTPGEPASISCRSSQSLVHSNRNTYLSWYQQKPGQAPRLLIYKVSNRFSGVPDRFSGSGSGTDFTLKISRVEAEDVGVYYCGQGTQVPYTFGQGTKLEIKRTVAAPSVFIFPPSDEQLKSGTASVVCLLNNFYPREAKVQWKVDNALQSGNSQESVTEQDSKDSTYSLSSTLTLSKADYEKHKVYACEVTHQGLSSPVTKSFNRGEC

SEQ ID NO: 409 - protein, 219 aa, Artificial; identical to SEQ ID NO: 56
  An artificially generated sequence

SEQ ID NO: 410 - protein, 219 aa, Artificial
  An artificially generated sequence
DIVMTQSPLSLPVTPGEPASISCRSSQPLVHSNRNTYLHWYQQKPGQAPRLLIYKVSNRFSGVPDRFSGSGSGTDFTLKISRVEAEDVGVYYCGQGTQVPYTFGQGTKLEIKRTVAAPSVFIFPPSDEQLKSGTASVVCLLNNFYPREAKVQWKVDNALQSGNSQESVTEQDSKDSTYSLSSTLTLSKADYEKHKVYACEVTHQGLSSPVTKSFNRGEC

SEQ ID NO: 411 - protein, 219 aa, Artificial
  An artificially generated sequence
DIVMTQSPLSLPVTPGEPASISCRSSQPPVHSNRNTYLHWYQQKPGQAPRLLIYKVSNRFSGVPDRFSGSGSGTDFTLKISRVEAEDVGVYYCGQGTQVPYTFGQGTKLEIKRTVAAPSVFIFPPSDEQLKSGTASVVCLLNNFYPREAKVQWKVDNALQSGNSQESVTEQDSKDSTYSLSSTLTLSKADYEKHKVYACEVTHQGLSSPVTKSFNRGEC

SEQ ID NO: 412 - protein, 219 aa, Artificial
  An artificially generated sequence
DIVMTQSPLSLPVTPGEPASISCRSSQSPVHSNRNTYIHWYQQKPGQAPRLLIYKVSNRFSGVPDRFSGSGSGTDFTLKISRVEAEDVGVYYCGQGTQVPYTFGQGTKLEIKRTVAAPSVFIFPPSDEQLKSGTASVVCLLNNFYPREAKVQWKVDNALQSGNSQESVTEQDSKDSTYSLSSTLTLSKADYEKHKVYACEVTHQGLSSPVTKSFNRGEC

SEQ ID NO: 413 - protein, 219 aa, Artificial
  An artificially generated sequence
DIVMTQSPLSLPVTPGEPASISCRSSQSPVHSNRNTYLHWYQQKPGQAPRLLIYKVSNRFRGVPDRFSGSGSGTDFTLKISRVEAEDVGVYYCGQGTQVPYTFGQGTKLEIKRTVAAPSVFIFPPSDEQLKSGTASVVCLLNNFYPREAKVQWKVDNALQSGNSQESVTEQDSKDSTYSLSSTLTLSKADYEKHKVYACEVTHQGLSSPVTKSFNRGEC

SEQ ID NO: 414 - protein, 219 aa, Artificial
  An artificially generated sequence
DIVMTQSPLSLPVTPGEPASISCRSSQSPVHSNRNTYLHWYQQKPGQAPRLLIYKVSNRFSGVPDRFSGSGSGTDFTLKISRVEAEDVGVYYCYQGTQVPYTFGQGTKLEIKRTVAAPSVFIFPPSDEQLKSGTASVVCLLNNFYPREAKVQWKVDNALQSGNSQESVTEQDSKDSTYSLSSTLTLSKADYEKHKVYACEVTHQGLSSPVTKSFNRGEC

SEQ ID NO: 415 - protein, 219 aa, Artificial
  An artificially generated sequence
DIVMTQSPLSLPVTPGEPASISCRSSQSPVHSNRNTYLHWYQQKPGQAPRLLIYKVSNRFWGVPDRFSGSGSGTDFTLKISRVEAEDVGVYYCYQGTQVPYTFGQGTKLEIKRTVAAPSVFIFPPSDEQLKSGTASVVCLLNNFYPREAKVQWKVDNALQSGNSQESVTEQDSKDSTYSLSSTLTLSKADYEKHKVYACEVTHQGLSSPVTKSFNRGEC

SEQ ID NO: 416 - protein, 219 aa, Artificial
  An artificially generated sequence
DIVMTQSPLSLPVTPGEPASISCRSSQSPVHSNRNTYIHWYQQKPGQAPRLLIYKVSNRFSGVPDRFSGSGSGTDFTLKISRVEAEDVGVYYCYQGTQVPYTFGQGTKLEIKRTVAAPSVFIFPPSDEQLKSGTASVVCLLNNFYPREAKVQWKVDNALQSGNSQESVTEQDSKDSTYSLSSTLTLSKADYEKHKVYACEVTHQGLSSPVTKSFNRGEC

SEQ ID NO: 417 - protein, 219 aa, Artificial
  An artificially generated sequence
DIVMTQSPLSLPVTPGEPASISCRSSQPPVHSNRNTYLHWYQQKPGQAPRLLIYKVSNRFSGVPDRFSGSGSGTDFTLKISRVEAEDVGVYYCYQGTQVPYTFGQGTKLEIKRTVAAPSVFIFPPSDEQLKSGTASVVCLLNNFYPREAKVQWKVDNALQSGNSQESVTEQDSKDSTYSLSSTLTLSKADYEKHKVYACEVTHQGLSSPVTKSFNRGEC

SEQ ID NO: 418 - protein, 219 aa, Artificial
  An artificially generated sequence
DIVMTQSPLSLPVTPGEPASISCRPSQSPVHSNRNTYLHWYQQKPGQAPRLLIYKVSNRFSGVPDRFSGSGSGTDFTLKISRVEAEDVGVYYCYQGTQVPYTFGQGTKLEIKRTVAAPSVFIFPPSDEQLKSGTASVVCLLNNFYPREAKVQWKVDNALQSGNSQESVTEQDSKDSTYSLSSTLTLSKADYEKHKVYACEVTHQGLSSPVTKSFNRGEC

SEQ ID NO: 419 - protein, 219 aa, Artificial
  An artificially generated sequence
DIVMTQSPLSLPVTPGEPASISCRSSQSPVHSNRNTYIQWYQQKPGQAPRLLIYKVSNRFSGVPDRFSGSGSGTDFTLKISRVEAEDVGVYYCYQGTQVPYTFGQGTKLEIKRTVAAPSVFIFPPSDEQLKSGTASVVCLLNNFYPREAKVQWKVDNALQSGNSQESVTEQDSKDSTYSLSSTLTLSKADYEKHKVYACEVTHQGLSSPVTKSFNRGEC

SEQ ID NO: 420 - protein, 122 aa, Artificial
  An artificially generated sequence
QVQLVESGGGVVQPGRSLRLSCAASGFTFSNAWMHWVRQAPGKGLEWVAQIKAKSNNYATYYAESVKGRFTISRDDSKNSLYLQMNSLKTEDTAVYYCRYVHYYYYYGVQAWGQGTTVTVSS

SEQ ID NO: 421 - protein, 122 aa, Artificial
  An artificially generated sequence
QVQLVESGGGVVQPGRSLRLSCAASGFTFSNAWMHWVRQAPGKGLEWVAQIKAKSNNYKKYYAESVKGRFTISRDDSKNSLYLQMNSLKTEDTAVYYCRYVHYYYYYGVQAWGQGTTVTVSS

SEQ ID NO: 422 - protein, 122 aa, Artificial
  An artificially generated sequence
QVQLVESGGGVVQPGRSLRLSCAASGFTFSNAWMHWVRQAPGKGLEWVAQIKAKSNNYATYYAESVKGRFTISRDDSKNSLYLQMNSLKTEDTAVYYCRRVHYGAYYGVDAWGQGTTVTVSS

SEQ ID NO: 423 - protein, 122 aa, Artificial
  An artificially generated sequence
QVQLVESGGGVVQPGRSLRLSCAASGFTFSNAWMHWVRQAPGKGLEWVAQIKAKSNNYATYYAESVKGRFTISRDDSKNSLYLQMNSLKTEDTAVYYCRRVHYYYYYGVDAWGQGTTVTVSS

SEQ ID NO: 424 - protein, 122 aa, Artificial; identical to SEQ ID NO: 42
  An artificially generated sequence

SEQ ID NO: 425 - protein, 122 aa, Artificial
  An artificially generated sequence
QVQLVESGGGVVQPGRSLRLSCAASGFTFSNAWMHWVRQAPGKGLEWVALIKAKSNNYATYYAESVKGRFTISRDDSKNSLYLQMNSLKTEDTAVYYCRYVHYGAYYGVDAWGQGTTVTVSS

SEQ ID NO: 426 - protein, 122 aa, Artificial
  An artificially generated sequence
QVQLVESGGGVVQPGRSLRLSCAASGFTFSNAWMHWVRQAPGKGLEWVANIKAKSNNYATYYAESVKGRFTISRDDSKNSLYLQMNSLKTEDTAVYYCRYVHYGAYYGVDAWGQGTTVTVSS

SEQ ID NO: 427 - protein, 122 aa, Artificial
  An artificially generated sequence
QVQLVESGGGVVQPGRSLRLSCAASGFTFSNAWMHWVRQAPGKGLEWVAQIKALSNNYATYYAESVKGRFTISRDDSKNSLYLQMNSLKTEDTAVYYCRYVHYGAYYGVDAWGQGTTVTVSS

SEQ ID NO: 428 - protein, 122 aa, Artificial
  An artificially generated sequence
QVQLVESGGGVVQPGRSLRLSCAASGFTFSNAWMHWVRQAPGKGLEWVAQIKAKSNNYATYYAESVKGRFTISRDDSKNSLYLQMNSLKTEDTAVYYCRYVHYYAYYGVDAWGQGTTVTVSS

SEQ ID NO: 429 - protein, 122 aa, Artificial
  An artificially generated sequence
QVQLVESGGGVVQPGRSLRLSCAASGFTFSNAWMHWVRQAPGKGLEWVAQIKAKSNNYATYYAESVKGRFTISRDDSKNSLYLQMNSLKTEDTAVYYCRYVHYYAYYGVQAWGQGTTVTVSS

SEQ ID NO: 430 - protein, 122 aa, Artificial
  An artificially generated sequence
QVQLVESGGGVVQPGRSLRLSCAASGFTFSNAWMHWVRQAPGKGLEWVAQIKAKSNNYATYYAESVKGRFTISRDDSKNSLYLQMNSLKTEDTAVYYCRYVHYYYYYGVDAWGQGTTVTVSS

SEQ ID NO: 431 - protein, 122 aa, Artificial
  An artificially generated sequence
QVQLVESGGGVVQPGRSLRLSCAASGFTFSNAWMHWVRQAPGKGLEWVAQIKAKSNNYKKYYAESVKGRFTISRDDSKNSLYLQMNSLKTEDTAVYYCRYVHYYYYYGVDAWGQGTTVTVSS

SEQ ID NO: 432 - protein, 107 aa, Artificial
  An artificially generated sequence
ASVAAPSVFIFPPSDEQLKSGTASVVCLLNNFYPREAKVQWKVDNALQSGNSQESVTEQDSKDSTYSLSSTLTLSKADYEKHKVYACEVTHQGLSSPVTKSFNRGEC

SEQ ID NO: 433 - protein, 439 aa, Artificial Sequence
  H0000-mF18mN4
QVQLVQSGAEVKKPGASVKVSCKASGYTFTDYEMHWIRQPPGQGLEWIGAIDPKTGDTAYSQKFKGRVTLTADKSTSTAYMELSSLTSEDTAVYYCTRFYSYTYWGQGTLVTVSSAKTTPPSVYPLAPGSAAQTNSMVTLGCLVKGYFPEPVTVTWNSGSLSSGVHTFPAVLQSDLYTLSSSVTVPSSTWPSETVTCNVAHPASSTKVDKKIVPRDCGCKPCICTVKEVSKVFIFPPKPKDVLTITLTPKVTCVVVDISKDDPEVQFSWFVDDVEVHTAQTQPREEQFNSTFRSVSELPIMHQDWLNGKEFKCRVNSAAFPAPIEKTISKTKGRPKAPQVYTIPPPKEQMAKDKVSLTCMITDFFPEDITVEWQWNGQPAENYKNTQPIMDTDGSYFVYSELNVQKSNWEAGNTFTCSVLHEGLHNHHTEKSLSHSPGK

SEQ ID NO: 434 - protein, 219 aa, Artificial Sequence
  GL4-mk1
DIVMTQSPLSLPVTPGEPASISCRSSQSLVHSNRNTYLHWYQQKPGQAPRLLIYKVSNRFSGVPDRFSGSGSGTDFTLKISRVEAEDVGVYYCSQNTHVPPTFGQGTKLEIKRADAAPTVSIFPPSSEQLTSGGASVVCFLNNFYPKDINVKWKIDGSERQNGVLNSWTDQDSKDSTYSMSSTLTLTKDEYERHNSYTCEATHKTSTSPIVKSFNRNEC

SEQ ID NO: 435 - protein, 440 aa, Artificial Sequence
  2C11VH-mF18mP4
EVQLVESGGGLVQPGKSLKLSCEASGFTFSGYGMHWVRQAPGRGLESVAYITSSSINIKYADAVKGRFTVSRDNAKNLLFLQMNILKSEDTAMYYCARFDWDKNYWGQGTMVTVSSAKTTPPSVYPLAPGSAAQTNSMVTLGCLVKGYFPEPVTVTWNSGSLSSGVHTFPAVLQSDLYTLSSSVTVPSSTWPSETVTCNVAHPASSTKVDKKIVPRDCGCKPCICTVKEVSKVFIFPPKPKDVLTITLTPKVTCVVVDISKDDPEVQFSWFVDDVEVHTAQTQPREEQFNSTFRSVSELPIMHQDWLNGKEFKCRVNSAAFPAPIEKTISKTKGRPKAPQVYTIPPPKEQMAKDKVSLTCMITDFFPEDITVEWQWNGQPAENYKNTQPIMRTDGSYFVYSKLNVQKSNWEAGNTFTCSVLHEGLHNHHTEKSLSHSPGK

SEQ ID NO: 436 - protein, 214 aa, Artificial Sequence
  2C11VL-mk1
DIQMTQSPSSLPASLGDRVTINCQASQDISNYLNWYQQKPGKAPKLLIYYTNKLADGVPSRFSGSGSGRDSSFTISSLESEDIGSYYCQQYYNYPWTFGPGTKLEIKRADAAPTVSIFPPSSEQLTSGGASVVCFLNNFYPKDINVKWKIDGSERQNGVLNSWTDQDSKDSTYSMSSTLTLTKDEYERHNSYTCEATHKTSTSPIVKSFNRNEC
